(19) United States
(12) Patent Application Publication
(10) Pub. No.: US 2026/0043029 A1
(43) Pub. Date: Feb. 12, 2026

(54) RNAi Agents for Inhibiting Expression of Thymic Stromal Lymphopoietin (TSLP), Compositions Thereof, and Methods of Use

(71) Applicant: Arrowhead Pharmaceuticals, Inc., Pasadena, CA (US)

(72) Inventors: Casi Schienebeck, Deerfield, WI (US); Szymon Klossowski, Middleton, WI (US); Tingting Yuan, Madison, WI (US); Tao Pei, Middleton, WI (US); Jeffrey Carlson, Madison, WI (US); Agnieszka Glebocka, Madison, WI (US); Mark Majewski, Rockton, IL (US)

(21) Appl. No.: 19/299,635

(22) Filed: Aug. 14, 2025

Related U.S. Application Data
(63) Continuation of application No. PCT/US24/15753, filed on Feb. 14, 2024.
(60) Provisional application No. 63/485,081, filed on Feb. 15, 2023.
(60) Provisional application No. 63/516,300, filed on Jul. 28, 2023.
(60) Provisional application No. 63/625,543, filed on Jan. 26, 2024.

(51) Int. Cl. C12N 15/113; A61P 11/06

(52) U.S. Cl. CPC C12N 15/1136; A61P 11/06; C12N 2310/14; C12N 2310/321; C12N 2310/322; C12N 2310/351; C12N 2320/32; C12N 2320/35

(57) ABSTRACT

Described are RNAi agents, compositions that include RNAi agents, and methods for inhibition of a thymic stromal lymphopoietin (TSLP) gene. The TSLP RNAi agents and RNAi agent conjugates disclosed herein inhibit the expression of an TSLP gene. Pharmaceutical compositions that include one or more TSLP RNAi agents, optionally with one or more additional therapeutics, are also described. Delivery of the described TSLP RNAi agents to pulmonary cells, in vivo, provides for inhibition of TSLP gene expression, which can provide a therapeutic benefit to subjects, including human subjects, for the treatment of various diseases including pulmonary inflammation diseases such as asthma, including allergic asthma.

### CROSS REFERENCE TO RELATED APPLICATIONS

[0001] This application is a continuation application of International Application No. PCT/US2024/015753, filed on Feb. 14, 2024, which claims the benefit of priority of U.S. Provisional Patent Application Ser. No. 63/485,081, filed on 15 Feb. 2023, U.S. Provisional Patent Application Ser. No. 63/516,300, filed on 28 Jul. 2023, and U.S. Provisional Patent Application Ser. No. 63/625,543, filed on 26 Jan. 2024, the contents of which are incorporated herein by reference in their entirety.

### SEQUENCE LISTING

[0002] This application contains a Sequence Listing (in compliance with Standard ST26), which has been submitted in xml format and is hereby incorporated by reference in its entirety. The xml sequence listing file is named 30723-US1_SeqListing.xml, created Aug. 12, 2025, and is 3,329,866 bytes in size.

### FIELD OF THE INVENTION

[0003] The present disclosure relates to RNA interference (RNAi) agents, e.g., double stranded oligonucleotide RNAi agents, for inhibition of Thymic Stromal Lymphopoietin (“TSLP”) gene expression, compositions that include TSLP RNAi agents, and methods of use thereof.

### BACKGROUND

[0004] Thymic Stromal Lymphopoietin (“TSLP”) is an epithelial cell-derived cytokine implicated in the initiation and persistence of inflammatory pathways in asthma (Parnes, et al. 2022). TSLP is a member of the 4-helix-bundle cytokine family and a distant paralog of interleukin (IL)-7, which is expressed by human epithelial cells in the thymus, lung, intestine, skin, and stroma, as well as in tonsils and mast cells (Hu, et al. 2017). TSLP affects various cell types through a heterodimeric receptor consisting of the IL-7 receptor chain (IL-7Ra) and a specific subunit, TSLP-specific receptor (TSLPR) (Pandey, et al. 2000).

[0005] Two variants (short and long) of human TSLP have been identified so far. Short-form TSLP (“sfTSLP”) (60 amino acids) is constitutively expressed and maintains homeostatic conditions in the skin, gut, oral epithelium, and salivary glands, and is downregulated in inflammatory conditions. In contrast, long-form TSLP (“lfTSLP”) (159 amino acids) is inducible, and it can be massively upregulated in inflammatory diseases like atopic dermatitis (AD) and allergic asthma (AA) (Adhikary, et al. 2021, Pelaia, et al. 2021). sfTSLP does not bind to the TSLPR and is incapable of blocking the binding of lfTSLP to this receptor (Adhikary, Tan et al. 2021).

[0006] TSLP stimulates dendritic cells to guide the differentiation of naïve Th cells towards the Th2 lineage, but can also promote Th17 commitment (Gauvreau, Sehmi et al. 2020). Moreover, TSLP activates ILC2, mast cells, and basophils, induces eosinophil survival and transmigration, and also affects the functions of airway structural cells such as fibroblasts and airway smooth muscle cells (Gauvreau, Sehmi et al. 2020). In allergic asthma, via activation of dendritic cells, TSLP promotes the differentiation of Th2 lymphocytes secreting IL-4, IL-5, IL-9, and IL-13, which target B cells, eosinophils, mast cells, and airway smooth muscle cells, respectively (Pelaia, et al. 2021). Given its position at the top of the inflammatory cascade, TSLP can exert broad influence over airway inflammation through its impact on multiple cell types and pathways. Therefore, treatments that are able to target TSLP would provide a novel approach to treat inflammation in asthma.

[0007] TSLP overexpression can be detected in both outer and inner surfaces of bronchial epithelial biopsies, as well as in serum, induced sputum, bronchoalveolar lavage fluid (BALF), and exhaled breath condensate of asthmatic patients and in mice with asthma (Al-Shami et al. 2005; Ying, et al. 2005; Zhou et al. 2005). Moreover, airway expression levels of TSLP are correlated with asthma severity and airflow (Ying, et al. 2008; Gauvreau, et al. 2020).

[0008] Genomic studies have shown that some single-nucleotide polymorphisms (SNPs) of the TSLP gene are associated with the risk of developing asthma (Torgerson, et al. 2011).

[0009] Tezepelumab is an anti-TSLP human monoclonal antibody for the treatment of asthma. In the PATHWAY phase 2b (NCT02054130) and NAVIGATOR phase 3 (NCT03347279) studies, tezepelumab significantly reduced exacerbation rates versus placebo in patients with severe, uncontrolled asthma (Corren, et al. 2017; Menzies-Gow, et al. 2021). Reported clinical benefits were associated with reductions in levels of a broad spectrum of cytokines (e.g., interleukin [IL]-5, IL-13) and baseline biomarkers (e.g., blood eosinophils, immunoglobulin [Ig]E, fractional exhaled nitric oxide [FeNO]) and were observed across a range of severe asthma phenotypes (including eosinophilic and non-eosinophilic)(Diver, et al. 2021; Puzzovio, et al. 2022). TSLP neutralizing antibody has also been reported to alleviate airway inflammation in different asthmatic models including mouse house dust mite (HDM), ovalbumin (OVA) and Toluene-diisocyanate (TDI)-induced models (Li, et al. 2010; Chen, et al. 2018; Yu, et al. 2019). However, tezepelumab requires administration of a subcutaneous injection every 4 weeks. A sufficiently safe, potent, and active RNA interference agent therapeutic targeting TSLP would provide an alternative therapy option for patients, and particularly if the RNAi agent can be administered through inhaled administration and/or on a less frequent (e.g., quarterly or bimonthly) basis, it could provide for an improved and more desirable therapy option for patients.

### SUMMARY

[0010] There exists a need for novel RNA interference (RNAi) agents (termed RNAi agents, RNAi triggers, or triggers), e.g., double stranded RNAi agents, that are able to selectively and efficiently inhibit the expression of a TSLP gene, including for use as a therapeutic or medicament. Further, there exists a need for compositions of novel TSLP-specific RNAi agents for the treatment of diseases or disorders associated with pulmonary inflammation such as asthma (specifically including allergic asthma) and/or disorders that can be mediated at least in part by a reduction in TSLP gene expression.

[0011] The nucleotide sequences and chemical modifications of the TSLP RNAi agents disclosed herein, as well as their combination with certain specific targeting ligands suitable for selectively and efficiently delivering the TSLP RNAi agents to relevant pulmonary cells in vivo, differ from what is previously disclosed or known in the art. The TSLP RNAi agents disclosed herein provide for highly potent and efficient inhibition of the expression of a TSLP gene.

[0012] In general, the present disclosure features TSLP gene-specific RNAi agents, compositions that include TSLP RNAi agents, and methods for inhibiting expression of a TSLP gene in vitro and/or in vivo using the TSLP RNAi agents and compositions that include TSLP RNAi agents described herein. The TSLP RNAi agents described herein are able to selectively and efficiently decrease expression of a TSLP gene, and thereby inhibiting the translation of TSLP proteins or cytokines that are at the beginning of the inflammatory cascade resulting in a reduction of airway inflammation.

[0013] The described TSLP RNAi agents can be used in methods for therapeutic treatment (including preventative or prophylactic treatment) of symptoms and diseases including, but not limited to, asthma including but not limited to allergic asthma, chronic obstructive pulmonary disease including but not limited to chronic bronchitis and emphysema, pulmonary inflammatory disorders, interstitial lung diseases (ILD), cystic fibrosis, various other types of fibrosis, infectious diseases (for example, SARS-COV-2), acute lung injury (for example, acute respiratory distress syndrome (ARDS)), pulmonary hypertension, various pulmonary cancers, chronic rhinosinutis either with or without nasal polyps, autoimmune disorders including but not limited to systemic sclerosis (SSc), and multiple inflammatory diseases including but not limited to atopic dermatitis, chronic spontaneous urticaria, and eosinophilic esophagitis.

[0014] In one aspect, the disclosure features RNAi agents for inhibiting expression of a TSLP gene, wherein the RNAi agent includes a sense strand (also referred to as a passenger strand) and an antisense strand (also referred to as a guide strand). The sense strand and the antisense strand can be partially, substantially, or fully complementary to each other. The length of the RNAi agent sense strands described herein each can be 12 to 49 nucleotides in length. The length of the RNAi agent antisense strands described herein each can be 18 to 30 nucleotides in length. In some embodiments, the sense and antisense strands are independently 18 to 26 nucleotides in length. The sense and antisense strands can be either the same length or different lengths. In some embodiments, the sense and antisense strands are independently 21 to 26 nucleotides in length. In some embodiments, the sense and antisense strands are independently 21 to 24 nucleotides in length. In some embodiments, both the sense strand and the antisense strand are 21 nucleotides in length. In some embodiments, the antisense strands are independently 18, 19, 20, 21, 22, 23, 24, 25, 26, 27, 28, 29, or 30 nucleotides in length. In some embodiments, the sense strands are independently 12, 13, 14, 15, 16, 17, 18, 19, 20, 21, 22, 23, 24, 25, 26, 27, 28, 29, 30, 31, 32, 33, 34, 35, 36, 37, 38, 39, 40, 41, 42, 43, 44, 45, 46, 47, 48, or 49 nucleotides in length. The RNAi agents described herein, upon delivery to a cell expressing TSLP such as a pulmonary cell, inhibit the expression of one or more TSLP gene variants in vivo and/or in vitro.

[0015] The TSLP RNAi agents disclosed herein target a human TSLP gene (see, e.g., SEQ ID NO:1). In some embodiments, the TSLP RNAi agents disclosed herein target a portion of a TSLP gene having the sequence of any of the sequences disclosed in Table 1.

[0016] In another aspect, the disclosure features compositions, including pharmaceutical compositions, that include one or more of the disclosed TSLP RNAi agents that are able to selectively and efficiently decrease expression of an TSLP gene. The compositions that include one or more TSLP RNAi agents described herein can be administered to a subject, such as a human or animal subject, for the treatment (including prophylactic treatment or inhibition) of symptoms and diseases including, but not limited to, asthma including but not limited to allergic asthma, chronic obstructive pulmonary disease including but not limited to chronic bronchitis and emphysema, pulmonary inflammatory disorders, interstitial lung diseases (ILD), cystic fibrosis, various other types of fibrosis, infectious diseases (for example, SARS-COV-2), acute lung injury (for example, acute respiratory distress syndrome (ARDS)), pulmonary hypertension, various pulmonary cancers, chronic rhinosinutis either with or without nasal polyps, autoimmune disorders including but not limited to systemic sclerosis (SSc), and multiple inflammatory diseases including but not limited to atopic dermatitis, chronic spontaneous urticaria, and eosinophilic esophagitis.

[0017] Examples of TSLP RNAi agent sense strands and antisense strands that can be used in a TSLP RNAi agent are provided in Tables 3, 4, 5, and 6. Examples of TSLP RNAi agent duplexes are provided in Tables 7A, 7B, 8, 9, and 10. Examples of 19-nucleotide core stretch sequences that may consist of or may be included in the sense strands and antisense strands of certain TSLP RNAi agents disclosed herein, are provided in Table 2.

[0018] In another aspect, the disclosure features methods for delivering TSLP RNAi agents to epithelial cells in a subject, such as a mammal, in vivo. Also described herein are compositions for use in such methods. In some embodiments, disclosed herein are methods for delivering TSLP RNAi agents to pulmonary cells (epithelial cells, macrophages, smooth muscle, endothelial cells) to a subject in vivo. In some embodiments, the subject is a human subject.

[0019] The methods disclosed herein include the administration of one or more TSLP RNAi agents to a subject, e.g., a human or animal subject, by any suitable means known in the art. The pharmaceutical compositions disclosed herein that include one or more TSLP RNAi agents can be administered in a number of ways depending upon whether local or systemic treatment is desired. Administration can be, but is not limited to, for example, intravenous, intraarterial, subcutaneous, intraperitoneal, subdermal (e.g., via an implanted device), and intraparenchymal administration. In some embodiments, the pharmaceutical compositions described herein are administered by inhalation (such as dry powder inhalation or aerosol inhalation) or through use of a nebulizer, intranasal administration, intratracheal administration, or oropharyngeal aspiration administration.

[0020] In some embodiments, it is desired that the TSLP RNAi agents described herein inhibit the expression of an TSLP gene in the pulmonary epithelium, for which the administration is by inhalation (e.g., by an inhaler device, such as a metered-dose inhaler, or a nebulizer such as a jet or vibrating mesh nebulizer, or a soft mist inhaler).

[0021] The one or more TSLP RNAi agents can be delivered to target cells or tissues using any oligonucleotide delivery technology known in the art. In some embodiments, a TSLP RNAi agent is delivered to cells or tissues by covalently linking the RNAi agent to a targeting group. In some embodiments, the targeting group can include a cell receptor ligand, such as an integrin targeting ligand. Integrins are a family of transmembrane receptors that facilitate cell-extracellular matrix (ECM) adhesion. In particular, integrin alpha-v-beta-6 (αvβ6) is an epithelial-specific integrin that is known to be a receptor for ECM proteins and the TGF-beta latency-associated peptide (LAP), and is expressed in various cells and tissues. Integrin αvβ6 is known to be highly upregulated in injured pulmonary epithelium. In some embodiments, the TSLP RNAi agents described herein are linked to an integrin targeting ligand that has affinity for integrin αvβ6. As referred to herein, an “αvβ6 integrin targeting ligand” is a compound that has affinity for integrin αvβ6, which can be utilized as a ligand to facilitate the targeting and delivery of an RNAi agent to which it is attached to the desired cells and/or tissues (i.e., to cells expressing integrin αvβ6). In some embodiments, multiple αvβ6 integrin targeting ligands or clusters of αvβ6 integrin targeting ligands are linked to a TSLP RNAi agent. In some embodiments, the TSLP RNAi agent-αvβ6 integrin targeting ligand conjugates are selectively internalized by lung epithelial cells, either through receptor-mediated endocytosis or by other means.

[0022] Examples of targeting groups useful for delivering TSLP RNAi agents that include αvβ6 integrin targeting ligands are disclosed, for example, in International Patent Application Publication No. WO 2018/085415 and International Patent Application Publication No. WO 2019/089765, the contents of each of which are incorporated by reference herein in their entirety.

[0023] A targeting group can be linked to the 3′ or 5′ end of a sense strand or an antisense strand of a TSLP RNAi agent. In some embodiments, a targeting group is linked to the 3′ or 5′ end of the sense strand. In some embodiments, a targeting group is linked to the 5′ end of the sense strand. In some embodiments, a targeting group is linked internally to a nucleotide on the sense strand and/or the antisense strand of the RNAi agent. In some embodiments, one or more targeting ligands are linked internally to one or more nucleotides on the sense strand of the RNAi agent. In some embodiments, a targeting group is linked to the RNAi agent via a linker.

[0024] In another aspect, the disclosure features compositions that include one or more TSLP RNAi agents that have the duplex structures disclosed in Tables 7A, 7B, 8, 9, and 10.

[0025] The use of TSLP RNAi agents provides methods for therapeutic (including prophylactic) treatment of diseases or disorders for which a reduction in TSLP can provide a therapeutic benefit. The TSLP RNAi agents disclosed herein can be used to treat various diseases such as asthma including but not limited to allergic asthma, chronic obstructive pulmonary disease including but not limited to chronic bronchitis and emphysema, pulmonary inflammatory disorders, interstitial lung diseases (ILD), cystic fibrosis, various other types of fibrosis, infectious diseases (for example, SARS-COV-2), acute lung injury (for example, acute respiratory distress syndrome (ARDS)), pulmonary hypertension, various pulmonary cancers, chronic rhinosinutis either with or without nasal polyps, autoimmune disorders including but not limited to systemic sclerosis (SSc), and multiple inflammatory diseases including but not limited to atopic dermatitis, chronic spontaneous urticaria, and eosinophilic esophagitis. In some embodiments, the TSLP RNAi agents disclosed herein can be used to treat a pulmonary inflammatory disease or condition. In some embodiments, the TSLP RNAi agents disclosed herein can be used to treat asthma. TSLP RNAi agents can be used to treat, for example, allergic asthma. Such methods of treatment include administration of a TSLP RNAi agent to a human being or animal for which a reduction in TSLP levels is desired.

### Definitions

[0026] As used herein, the terms “oligonucleotide” and “polynucleotide” mean a polymer of linked nucleosides each of which can be independently modified or unmodified.

[0027] As used herein, an “RNAi agent” (also referred to as an “RNAi trigger”) means a composition of matter that contains an RNA or RNA-like (e.g., chemically modified RNA) oligonucleotide molecule that is capable of degrading or inhibiting (e.g., degrades or inhibits under appropriate conditions) translation of messenger RNA (mRNA) transcripts of a target mRNA in a sequence specific manner. As used herein, RNAi agents may operate through the RNA interference mechanism (i.e., inducing RNA interference through interaction with the RNA interference pathway machinery (RNA-induced silencing complex or RISC) of mammalian cells), or by any alternative mechanism(s) or pathway(s). While it is believed that RNAi agents, as that term is used herein, operate primarily through the RNA interference mechanism, the disclosed RNAi agents are not bound by or limited to any particular pathway or mechanism of action. RNAi agents disclosed herein are comprised of a sense strand and an antisense strand, and include, but are not limited to: short (or small) interfering RNAs (siRNAs), double stranded RNAs (dsRNA), micro RNAs (miRNAs), short hairpin RNAs (shRNA), and dicer substrates. The antisense strand of the RNAi agents described herein is at least partially complementary to the mRNA being targeted (i.e. TSLP mRNA). RNAi agents can include one or more modified nucleotides and/or one or more non-phosphodiester linkages.

[0028] As used herein, the terms “silence,” “reduce,” “inhibit,” “down-regulate,” or “knockdown” when referring to expression of a given gene, mean that the expression of the gene, as measured by the level of RNA transcribed from the gene or the level of polypeptide, protein, or protein subunit translated from the mRNA in a cell, group of cells, tissue, organ, or subject in which the gene is transcribed, is reduced when the cell, group of cells, tissue, organ, or subject is treated with the RNAi agents described herein as compared to a second cell, group of cells, tissue, organ, or subject that has not or have not been so treated.

[0029] As used herein, the terms “sequence” and “nucleotide sequence” mean a succession or order of nucleobases or nucleotides, described with a succession of letters using standard nomenclature.

[0030] As used herein, a “base,” “nucleotide base,” or “nucleobase,” is a heterocyclic pyrimidine or purine compound that is a component of a nucleotide, and includes the primary purine bases adenine and guanine, and the primary pyrimidine bases cytosine, thymine, and uracil. A nucleobase may further be modified to include, without limitation, universal bases, hydrophobic bases, promiscuous bases, size-expanded bases, and fluorinated bases. (See. e.g., Modified Nucleosides in Biochemistry, Biotechnology and Medicine, Herdewijn, P. ed. Wiley-VCH, 2008). The synthesis of such modified nucleobases (including phosphoramidite compounds that include modified nucleobases) is known in the art.

[0031] As used herein, and unless otherwise indicated, the term “complementary,” when used to describe a first nucleobase or nucleotide sequence (e.g., RNAi agent sense strand or targeted mRNA) in relation to a second nucleobase or nucleotide sequence (e.g., RNAi agent antisense strand or a single-stranded antisense oligonucleotide), means the ability of an oligonucleotide or polynucleotide including the first nucleotide sequence to hybridize (form base pair hydrogen bonds under mammalian physiological conditions (or otherwise suitable in vivo or in vitro conditions)) and form a duplex or double helical structure under certain standard conditions with an oligonucleotide that includes the second nucleotide sequence. The person of ordinary skill in the art would be able to select the set of conditions most appropriate for a hybridization test. Complementary sequences include Watson-Crick base pairs or non-Watson-Crick base pairs and include natural or modified nucleotides or nucleotide mimics, at least to the extent that the above hybridization requirements are fulfilled. Sequence identity or complementarity is independent of modification. For example, a and Af, as defined herein, are complementary to U (or T) and identical to A for the purposes of determining identity or complementarity.

[0032] As used herein, “perfectly complementary” or “fully complementary” means that in a hybridized pair of nucleobase or nucleotide sequence molecules, all (100%) of the bases in a contiguous sequence of a first oligonucleotide will hybridize with the same number of bases in a contiguous sequence of a second oligonucleotide. The contiguous sequence may comprise all or a part of a first or second nucleotide sequence.

[0033] As used herein, “partially complementary” means that in a hybridized pair of nucleobase or nucleotide sequence molecules, at least 70%, but not all, of the bases in a contiguous sequence of a first oligonucleotide will hybridize with the same number of bases in a contiguous sequence of a second oligonucleotide. The contiguous sequence may comprise all or a part of a first or second nucleotide sequence.

[0034] As used herein, “substantially complementary” means that in a hybridized pair of nucleobase or nucleotide sequence molecules, at least 85%, but not all, of the bases in a contiguous sequence of a first oligonucleotide will hybridize with the same number of bases in a contiguous sequence of a second oligonucleotide. The contiguous sequence may comprise all or a part of a first or second nucleotide sequence.

[0035] As used herein, the terms “complementary,” “fully complementary,” “partially complementary,” and “substantially complementary” are used with respect to the nucleobase or nucleotide matching between the sense strand and the antisense strand of an RNAi agent, or between the antisense strand of an RNAi agent and a sequence of an TSLP mRNA.

[0036] As used herein, the term “substantially identical” or “substantial identity,” as applied to a nucleic acid sequence means the nucleotide sequence (or a portion of a nucleotide sequence) has at least about 85% sequence identity or more, e.g., at least 90%, at least 95%, or at least 99% identity, compared to a reference sequence. Percentage of sequence identity is determined by comparing two optimally aligned sequences over a comparison window. The percentage is calculated by determining the number of positions at which the same type of nucleic acid base occurs in both sequences to yield the number of matched positions, dividing the number of matched positions by the total number of positions in the window of comparison and multiplying the result by 100 to yield the percentage of sequence identity. The inventions disclosed herein encompass nucleotide sequences substantially identical to those disclosed herein.

[0037] As used herein, the terms “treat,” “treatment,” and the like, mean the methods or steps taken to provide relief from or alleviation of the number, severity, and/or frequency of one or more symptoms of a disease in a subject. As used herein, “treat” and “treatment” may include the prevention, management, prophylactic treatment, and/or inhibition or reduction of the number, severity, and/or frequency of one or more symptoms of a disease in a subject.

[0038] As used herein, the phrase “introducing into a cell,” when referring to an RNAi agent, means functionally delivering the RNAi agent into a cell. The phrase “functional delivery,” means delivering the RNAi agent to the cell in a manner that enables the RNAi agent to have the expected biological activity, e.g., sequence-specific inhibition of gene expression.

[0039] Unless stated otherwise, use of the symbol

[chemical structure]

as used herein means that any group or groups may be linked thereto that is in accordance with the scope of the inventions described herein.

[0040] As used herein, the term “isomers” refers to compounds that have identical molecular formulae, but that differ in the nature or the sequence of bonding of their atoms or in the arrangement of their atoms in space. Isomers that differ in the arrangement of their atoms in space are termed “stereoisomers.” Stereoisomers that are not mirror images of one another are termed “diastereoisomers,” and stereoisomers that are non-superimposable mirror images are termed “enantiomers,” or sometimes optical isomers. A carbon atom bonded to four non-identical substituents is termed a “chiral center.”

[0041] As used herein, unless specifically identified in a structure as having a particular conformation, for each structure in which asymmetric centers are present and thus give rise to enantiomers, diastereomers, or other stereoisomeric configurations, each structure disclosed herein is intended to represent all such possible isomers, including their optically pure and racemic forms. For example, the structures disclosed herein are intended to cover mixtures of diastereomers as well as single stereoisomers.

[0042] As used in a claim herein, the phrase “consisting of” excludes any element, step, or ingredient not specified in the claim. When used in a claim herein, the phrase “consisting essentially of” limits the scope of a claim to the specified materials or steps and those that do not materially affect the basic and novel characteristic(s) of the claimed invention.

[0043] The person of ordinary skill in the art would readily understand and appreciate that the compounds and compositions disclosed herein may have certain atoms (e.g., N, O, or S atoms) in a protonated or deprotonated state, depending upon the environment in which the compound or composition is placed. Accordingly, as used herein, the structures disclosed herein envisage that certain functional groups, such as, for example, OH, SH, or NH, may be protonated or deprotonated. The disclosure herein is intended to cover the disclosed compounds and compositions regardless of their state of protonation based on the environment (such as pH), as would be readily understood by the person of ordinary skill in the art. Correspondingly, compounds described herein with labile protons or basic atoms should also be understood to represent salt forms of the corresponding compound. Compounds described herein may be in a free-acid, free-base, or salt form. Pharmaceutically acceptable salts of the compounds described herein should be understood to be within the scope of the invention.

[0044] As used herein, the term “linked” or “conjugated” when referring to the connection between two compounds or molecules means that two compounds or molecules are joined by a covalent bond. Unless stated, the terms “linked” and “conjugated” as used herein may refer to the connection between a first compound and a second compound either with or without any intervening atoms or groups of atoms.

[0045] As used herein, the term “including” is used to herein mean, and is used interchangeably with, the phrase “including but not limited to.” The term “or” is used herein to mean, and is used interchangeably with, the term “and/or,” unless the context clearly indicates otherwise.

[0046] Unless otherwise defined, all technical and scientific terms used herein have the same meaning as commonly understood by one of ordinary skill in the art. Although methods and materials similar or equivalent to those described herein can be used in the practice or testing of the present invention, suitable methods and materials are described below. All publications, patent applications, patents, and other references mentioned herein are incorporated by reference in their entirety. In case of conflict, the present specification, including definitions, will control. In addition, the materials, methods, and examples are illustrative only and not intended to be limiting.

[0047] Other objects, features, aspects, and advantages of the invention will be apparent from the following detailed description, accompanying figures, and from the claims.

### BRIEF DESCRIPTION OF THE DRAWINGS

[0048] FIG. 1. Chemical structure representation of the tridentate αvβ6 epithelial cell targeting ligand referred to herein as Tri-SM6.1-αvb6-(TA14).

[0049] FIG. 2. Graph plotting the reduction of hTSLP protein in AAV transduced mouse lungs of certain TSLP RNAi agents tested (see also Example 5).

[0050] FIG. 3A. and FIG. 3B. Graphs plotting reduction of hTSLP protein in AAV transduced mouse lungs of the RNAi agents tested (see also Example 7). The samples were analyzed for protein expression on separate plates (plate 1 shown in FIG. 3A; plate 2 shown in FIG. 3B); the same control was used for both plates.

[0051] FIG. 4A, FIG. 4B, and FIG. 4C. Graphs plotting reduction of lung TSLP mRNA (FIG. 4A) and BAL inflammatory cell counts in rats treated with TSLP RNAi agents. The BAL samples were evaluated for eosinophils (FIG. 4B) and BAL total cells (FIG. 4C) (see also Example 10).

[0052] FIG. 5A, FIG. 5B, and FIG. 5C. Graphs plotting lung mRNA levels of TSLP (FIG. 5A), IL-13 (FIG. 5B), and IL-33 (FIG. 5C) in rats administered with rat-specific TSLP RNAi agents (see also Example 3).

[0053] FIG. 5D, FIG. 5E, and FIG. 5F. Graphs plotting BAL soluble collagen (FIG. 5D), BAL IL-5 (FIG. 5E), and BAL IL-13 (FIG. 5F) in rats administered with rat-specific TSLP RNAi agents (see also Example 3).

[0054] FIG. 6A, FIG. 6B, and FIG. 6C. Graphs plotting human TSLP mRNA in transduced mouse lungs (FIG. 6A), human TSLP protein in AAV transduced mouse lungs (FIG. 6B), and human TSLP protein in serum of AAV transduced mice (FIG. 6C) (see also Example 11).

[0055] FIG. 7. Graph plotting human TSLP protein in AAV transduced mouse lungs (see also Example 15).

[0056] FIG. 8. Graph plotting human TSLP protein in AAV transduced mouse lungs (see also Example 16).

[0057] FIG. 9A and FIG. 9B. Graph plotting human TSLP protein in AAV transduced mouse lungs (FIG. 9A) and mouse serum (FIG. 9B) (see also Example 18).

[0058] FIG. 10A and FIG. 10B. Graph plotting human TSLP protein in AAV transduced mouse lungs (FIG. 10A) and mouse serum (FIG. 10B) (see also Example 19).

[0059] FIG. 11A and FIG. 11B. Graph plotting human TSLP protein in AAV transduced mouse lungs (FIG. 11A) and mouse serum (FIG. 11B) (see also Example 25).

[0060] FIG. 12A and FIG. 12B. Graph plotting human TSLP protein in AAV transduced mouse lungs (FIG. 12A) and mouse serum (FIG. 12B) (see also Example 26).

### DETAILED DESCRIPTION

### RNAi Agents

[0061] Described herein are RNAi agents for inhibiting expression of a TSLP gene (referred to herein as TSLP RNAi agents or TSLP RNAi triggers). Each TSLP RNAi agent disclosed herein comprises a sense strand and an antisense strand. The sense strand can be 12 to 49 nucleotides in length. The antisense strand can be 18 to 49 nucleotides in length. The sense and antisense strands can be either the same length or they can be different lengths. In some embodiments, the sense and antisense strands are each independently 18 to 27 nucleotides in length. In some embodiments, both the sense and antisense strands are each 21-26 nucleotides in length. In some embodiments, the sense and antisense strands are each 21-24 nucleotides in length. In some embodiments, the sense and antisense strands are each independently 19-21 nucleotides in length. In some embodiments, the sense strand is about 19 nucleotides in length while the antisense strand is about 21 nucleotides in length. In some embodiments, the sense strand is about 21 nucleotides in length while the antisense strand is about 23 nucleotides in length. In some embodiments, a sense strand is 23 nucleotides in length and an antisense strand is 21 nucleotides in length. In some embodiments, both the sense and antisense strands are each 21 nucleotides in length. In some embodiments, the RNAi agent sense strands are each independently 12, 13, 14, 15, 16, 17, 18, 19, 20, 21, 22, 23, 24, 25, 26, 27, 28, 29, 30, 31, 32, 33, 34, 35, 36, 37, 38, 39, 40, 41, 42, 43, 44, 45, 46, 47, 48, or 49 nucleotides in length. In some embodiments, the RNAi agent antisense strands are each independently 18, 19, 20, 21, 22, 23, 24, 25, 26, 27, 28, 29, or 30 nucleotides in length. In some embodiments, the RNAi agent is double stranded and has a duplex length of about 12, 13, 14, 15, 16, 17, 18, 19, 20, 21, 22, 23 or 24 nucleotides. In some embodiments, the RNAi agent is double stranded and has a duplex length of 19, 20, 21, 22, or 23 nucleotides.

[0062] Examples of nucleotide sequences used in forming TSLP RNAi agents are provided in Tables 2, 3, 4, 5, 6, and 10. Examples of RNAi agent duplexes, that include the sense strand and antisense strand sequences in Tables 2, 3, 4, 5, 6, are shown in Tables 7A, 7B, 8, 9, and 10.

[0063] In some embodiments, the region of perfect, substantial, or partial complementarity between the sense strand and the antisense strand is 16-26 (e.g., 16, 17, 18, 19, 20, 21, 22, 23, 24, 25, or 26) nucleotides in length and occurs at or near the 5′ end of the antisense strand (e.g., this region may be separated from the 5′ end of the antisense strand by 0, 1, 2, 3, or 4 nucleotides that are not perfectly, substantially, or partially complementary).

[0064] A sense strand of the TSLP RNAi agents described herein includes at least 12 consecutive nucleotides that have at least 85% identity to a core stretch sequence (also referred to herein as a “core stretch” or “core sequence”) of the same number of nucleotides in an TSLP mRNA. In some embodiments, a sense strand core stretch sequence is 100% (perfectly) complementary or at least about 85% (substantially) complementary to a core stretch sequence in the antisense strand, and thus the sense strand core stretch sequence is typically perfectly identical or at least about 85% identical to a nucleotide sequence of the same length (sometimes referred to, e.g., as a target sequence) present in the TSLP mRNA target. In some embodiments, this sense strand core stretch is 16, 17, 18, 19, 20, 21, 22, or 23 nucleotides in length. In some embodiments, this sense strand core stretch is 17 nucleotides in length. In some embodiments, this sense strand core stretch is 19 nucleotides in length. In some embodiments, this sense strand core stretch is 21 nucleotides in length.

[0065] An antisense strand of a TSLP RNAi agent described herein includes at least 15 consecutive nucleotides that have at least 85% complementarity to a core stretch of the same number of nucleotides in an TSLP mRNA and to a core stretch of the same number of nucleotides in the corresponding sense strand. In some embodiments, an antisense strand core stretch is 100% (perfectly) complementary or at least about 85% (substantially) complementary to a nucleotide sequence (e.g., target sequence) of the same length present in the TSLP mRNA target. In some embodiments, this antisense strand core stretch is 17, 18, 19, 20, 21, 22, or 23 nucleotides in length. In some embodiments, this antisense strand core stretch is 19 nucleotides in length. In some embodiments, this antisense strand core stretch is 17 nucleotides in length. A sense strand core stretch sequence can be the same length as a corresponding antisense core sequence or it can be a different length.

[0066] The TSLP RNAi agent sense and antisense strands anneal to form a duplex. A sense strand and an antisense strand of a TSLP RNAi agent can be partially, substantially, or fully complementary to each other. Within the complementary duplex region, the sense strand core stretch sequence is at least 85% complementary or 100% complementary to the antisense core stretch sequence. In some embodiments, the sense strand core stretch sequence contains a sequence of at least 16, at least 17, at least 18, at least 19, at least 20, at least 21, at least 22, or at least 23 nucleotides that is at least 85% or 100% complementary to a corresponding 16, 17, 18, 19, 20, 21, 22, or 23 nucleotide sequence of the antisense strand core stretch sequence (i.e., the sense and antisense core stretch sequences of a TSLP RNAi agent have a region of at least 16, at least 17, at least 18, at least 19, at least 20, at least 21, at least 22, or at least 23 nucleotides that is at least 85% base paired or 100% base paired.)

[0067] In some embodiments, the antisense strand of a TSLP RNAi agent disclosed herein differs by 0, 1, 2, or 3 nucleotides from any of the antisense strand sequences in Table 2 or Table 3. In some embodiments, the sense strand of a TSLP RNAi agent disclosed herein differs by 0, 1, 2, or 3 nucleotides from any of the sense strand sequences in Table 2, Table 4, Table 5, Table 6, or Table 10.

[0068] In some embodiments, the sense strand and/or the antisense strand can optionally and independently contain an additional 1, 2, 3, 4, 5, or 6 nucleotides (extension) at the 3′ end, the 5′ end, or both the 3′ and 5′ ends of the core stretch sequences. The antisense strand additional nucleotides, if present, may or may not be complementary to the corresponding sequence in the TSLP mRNA. The sense strand additional nucleotides, if present, may or may not be identical to the corresponding sequence in the TSLP mRNA. The antisense strand additional nucleotides, if present, may or may not be complementary to the corresponding sense strand's additional nucleotides, if present.

[0069] As used herein, an extension comprises 1, 2, 3, 4, 5, or 6 nucleotides at the 5′ and/or 3′ end of the sense strand core stretch sequence and/or antisense strand core stretch sequence. The extension nucleotides on a sense strand may or may not be complementary to nucleotides, either core stretch sequence nucleotides or extension nucleotides, in the corresponding antisense strand. Conversely, the extension nucleotides on an antisense strand may or may not be complementary to nucleotides, either core stretch nucleotides or extension nucleotides, in the corresponding sense strand. In some embodiments, both the sense strand and the antisense strand of an RNAi agent contain 3′ and 5′ extensions. In some embodiments, one or more of the 3′ extension nucleotides of one strand base pairs with one or more 5′ extension nucleotides of the other strand. In other embodiments, one or more of 3′ extension nucleotides of one strand do not base pair with one or more 5′ extension nucleotides of the other strand. In some embodiments, a TSLP RNAi agent has an antisense strand having a 3′ extension and a sense strand having a 5′ extension. In some embodiments, the extension nucleotide(s) are unpaired and form an overhang. As used herein, an “overhang” refers to a stretch of one or more unpaired nucleotides located at a terminal end of either the sense strand or the antisense strand that does not form part of the hybridized or duplexed portion of an RNAi agent disclosed herein (See. e.g., U.S. Pat. No. 8,362,231).

[0070] In some embodiments, a TSLP RNAi agent comprises an antisense strand having a 3′ extension of 1, 2, 3, 4, 5, or 6 nucleotides in length. In other embodiments, a TSLP RNAi agent comprises an antisense strand having a 3′ extension of 1, 2, or 3 nucleotides in length. In some embodiments, one or more of the antisense strand extension nucleotides comprise nucleotides that are complementary to the corresponding TSLP mRNA sequence. In some embodiments, one or more of the antisense strand extension nucleotides comprise nucleotides that are not complementary to the corresponding TSLP mRNA sequence.

[0071] In some embodiments, a TSLP RNAi agent comprises a sense strand having a 3′ extension of 1, 2, 3, 4, or 5 nucleotides in length. In some embodiments, one or more of the sense strand extension nucleotides comprises adenosine, uracil, or thymidine nucleotides, AT dinucleotide, or nucleotides that correspond to or are the identical to nucleotides in the TSLP mRNA sequence. In some embodiments, the 3′ sense strand extension includes or consists of one of the following sequences, but is not limited to: T, UT, TT, UU, UUT, TTT, or TTTT (each listed 5′ to 3′).

[0072] A sense strand can have a 3′ extension and/or a 5′ extension. In some embodiments, a TSLP RNAi agent comprises a sense strand having a 5′ extension of 1, 2, 3, 4, 5, or 6 nucleotides in length. In some embodiments, one or more of the sense strand extension nucleotides comprise nucleotides that correspond to or are identical to nucleotides in the TSLP mRNA sequence.

[0073] Examples of sequences used in forming TSLP RNAi agents are provided in Tables 2, 3, 4, 5, 6, and 10. In some embodiments, a TSLP RNAi agent antisense strand includes a sequence of any of the sequences in Tables 2, 3, or 10. In certain embodiments, a TSLP RNAi agent antisense strand comprises or consists of any one of the modified sequences in Table 3. In some embodiments, a TSLP RNAi agent antisense strand includes the sequence of nucleotides (from 5′ end→3′ end) 1-17, 2-15, 2-17, 1-18, 2-18, 1-19, 2-19, 1-20, 2-20, 1-21, or 2-21, of any of the sequences in Tables 2 or 3. In some embodiments, a TSLP RNAi agent sense strand includes the sequence of any of the sequences in Tables 2, 4, 5, or 6. In some embodiments, a TSLP RNAi agent sense strand includes the sequence of nucleotides (from 5′ end→3′ end) 1-18, 1-19, 1-20, 1-21, 2-19, 2-20, 2-21, 3-20, 3-21, or 4-21 of any of the sequences in Tables 2, 4, 5, or 6. In certain embodiments, a TSLP RNAi agent sense strand comprises or consists of a modified sequence of any one of the modified sequences in Table 4, 5, 6, or 10.

[0074] In some embodiments, the sense and antisense strands of the RNAi agents described herein contain the same number of nucleotides. In some embodiments, the sense and antisense strands of the RNAi agents described herein contain different numbers of nucleotides. In some embodiments, the sense strand 5′ end and the antisense strand 3′ end of an RNAi agent form a blunt end. In some embodiments, the sense strand 3′ end and the antisense strand 5′ end of an RNAi agent form a blunt end. In some embodiments, both ends of an RNAi agent form blunt ends. In some embodiments, neither end of an RNAi agent is blunt-ended. As used herein a “blunt end” refers to an end of a double stranded RNAi agent in which the terminal nucleotides of the two annealed strands are complementary (form a complementary base-pair).

[0075] In some embodiments, the sense strand 5′ end and the antisense strand 3′ end of an RNAi agent form a frayed end. In some embodiments, the sense strand 3′ end and the antisense strand 5′ end of an RNAi agent form a frayed end. In some embodiments, both ends of an RNAi agent form a frayed end. In some embodiments, neither end of an RNAi agent is a frayed end. As used herein a frayed end refers to an end of a double stranded RNAi agent in which the terminal nucleotides of the two annealed strands form a pair (i.e., do not form an overhang) but are not complementary (i.e. form a non-complementary pair). In some embodiments, one or more unpaired nucleotides at the end of one strand of a double stranded RNAi agent form an overhang. The unpaired nucleotides may be on the sense strand or the antisense strand, creating either 3′ or 5′ overhangs. In some embodiments, the RNAi agent contains: a blunt end and a frayed end, a blunt end and 5′ overhang end, a blunt end and a 3′ overhang end, a frayed end and a 5′ overhang end, a frayed end and a 3′ overhang end, two 5′ overhang ends, two 3′ overhang ends, a 5′ overhang end and a 3′ overhang end, two frayed ends, or two blunt ends. Typically, when present, overhangs are located at the 3′ terminal ends of the sense strand, the antisense strand, or both the sense strand and the antisense strand.

[0076] The TSLP RNAi agents disclosed herein may also be comprised of one or more modified nucleotides. In some embodiments, substantially all of the nucleotides of the sense strand and substantially all of the nucleotides of the antisense strand of the TSLP RNAi agent are modified nucleotides. The TSLP RNAi agents disclosed herein may further be comprised of one or more modified internucleoside linkages, e.g., one or more phosphorothioate linkages. In some embodiments, a TSLP RNAi agent contains one or more modified nucleotides and one or more modified internucleoside linkages. In some embodiments, a 2′-modified nucleotide is combined with modified internucleoside linkage.

[0077] In some embodiments, a TSLP RNAi agent is prepared or provided as a salt, mixed salt, or a free acid. In some embodiments, a TSLP RNAi agent is prepared as a pharmaceutically acceptable salt. In some embodiments, a TSLP RNAi agent is prepared as a pharmaceutically acceptable sodium salt. Such forms that are well known in the art are within the scope of the inventions disclosed herein.

### Modified Nucleotides

[0078] Modified nucleotides, when used in various oligonucleotide constructs, can preserve activity of the compound in cells while at the same time increasing the serum stability of these compounds, and can also minimize the possibility of activating interferon activity in humans upon administration of the oligonucleotide construct.

[0079] In some embodiments, a TSLP RNAi agent contains one or more modified nucleotides. As used herein, a “modified nucleotide” is a nucleotide other than a ribonucleotide (2′-hydroxyl nucleotide). In some embodiments, at least 50% (e.g., at least 60%, at least 70%, at least 80%, at least 90%, at least 95%, at least 97%, at least 98%, at least 99%, or 100%) of the nucleotides are modified nucleotides. As used herein, modified nucleotides can include, but are not limited to, deoxyribonucleotides, nucleotide mimics, abasic nucleotides, 2′-modified nucleotides, 3′-modified nucleotides (2′-internucleoside linked), inverted nucleotides, modified nucleobase-comprising nucleotides, bridged nucleotides, peptide nucleic acids (PNAs), 2′,3′-seco nucleotide mimics (unlocked nucleobase analogues), locked nucleotides, 3′-O-methoxy (2′-internucleoside linked) nucleotides, 2′-F-Arabino nucleotides, 5′-Methyl-2′-fluoro nucleotides, morpholino nucleotides (modified nucleotides with a morpholine ring), nucleotides where the typical 5-membered sugar ring of the nucleotide has been modified, vinyl phosphonate deoxyribonucleotides, vinyl phosphonate containing nucleotides, and cyclopropyl phosphonate containing nucleotides. 2′-modified nucleotides (i.e., a nucleotide with a group other than a hydroxyl group at the 2′ position of the five-membered sugar ring) include, but are not limited to, 2′-O-methyl nucleotides (also referred to as 2′-methoxy nucleotides), 2′-fluoro nucleotides (also referred as 2′-deoxy-2′-fluoro nucleotides), 2′-deoxy nucleotides, 2′-methoxyethyl (2′-O-2-methoxylethyl) nucleotides (also referred to as 2′-MOE nucleotides), 2′-amino nucleotides, 2′-halo nucleotides, and 2′-alkyl nucleotides. It is not necessary for all positions in a given compound to be uniformly modified. Conversely, more than one modification can be incorporated in a single TSLP RNAi agent or even in a single nucleotide thereof. The TSLP RNAi agent sense strands and antisense strands can be synthesized and/or modified by methods known in the art. Modification at one nucleotide is independent of modification at another nucleotide.

[0080] Modified nucleobases include synthetic and natural nucleobases, such as 5-substituted pyrimidines, 6-azapyrimidines and N-2, N-6 and O-6 substituted purines, (e.g., 2-aminopropyladenine, 5-propynyluracil, or 5-propynylcytosine), 5-methylcytosine (5-me-C), 5-hydroxymethyl cytosine, inosine, xanthine, hypoxanthine, 2-aminoadenine, 6-alkyl (e.g., 6-methyl, 6-ethyl, 6-isopropyl, or 6-n-butyl) derivatives of adenine and guanine, 2-alkyl (e.g., 2-methyl, 2-ethyl, 2-isopropyl, or 2-n-butyl) and other alkyl derivatives of adenine and guanine, 2-thiouracil, 2-thiothymine, 2-thiocytosine, 5-halouracil, cytosine, 5-propynyl uracil, 5-propynyl cytosine, 6-azo uracil, 6-azo cytosine, 6-azo thymine, 5-uracil (pseudouracil), 4-thiouracil, 8-halo, 8-amino, 8-sulfhydryl, 8-thioalkyl, 8-hydroxyl and other 8-substituted adenines and guanines, 5-halo (e.g., 5-bromo), 5-trifluoromethyl, and other 5-substituted uracils and cytosines, 7-methylguanine and 7-methyladenine, 8-azaguanine and 8-azaadenine, 7-deazaguanine, 7-deazaadenine, 3-deazaguanine, and 3-deazaadenine.

[0081] In some embodiments, the 5′ and/or 3′ end of the antisense strand can include abasic residues (Ab), which can also be referred to as an “abasic site” or “abasic nucleotide.” An abasic residue (Ab) is a nucleotide or nucleoside that lacks a nucleobase at the 1′ position of the sugar moiety. (See. e.g., U.S. Pat. No. 5,998,203). In some embodiments, an abasic residue can be placed internally in a nucleotide sequence. In some embodiments, Ab or AbAb can be added to the 3′ end of the antisense strand. In some embodiments, the 5′ end of the sense strand can include one or more additional abasic residues (e.g., (Ab) or (AbAb)). In some embodiments, UUAb, UAb, or Ab are added to the 3′ end of the sense strand. In some embodiments, an abasic (deoxyribose) residue can be replaced with a ribitol (abasic ribose) residue.

[0082] In some embodiments, all or substantially all of the nucleotides of an RNAi agent are modified nucleotides. As used herein, an RNAi agent wherein substantially all of the nucleotides present are modified nucleotides is an RNAi agent having four or fewer (i.e., 0, 1, 2, 3, or 4) nucleotides in both the sense strand and the antisense strand being ribonucleotides (i.e., unmodified). As used herein, a sense strand wherein substantially all of the nucleotides present are modified nucleotides is a sense strand having two or fewer (i.e., 0, 1, or 2) nucleotides in the sense strand being unmodified ribonucleotides. As used herein, an antisense sense strand wherein substantially all of the nucleotides present are modified nucleotides is an antisense strand having two or fewer (i.e., 0, 1, or 2) nucleotides in the antisense strand being unmodified ribonucleotides. In some embodiments, one or more nucleotides of an RNAi agent is an unmodified ribonucleotide. Chemical structures for certain modified nucleotides are set forth in Table 11 herein.

### Modified Internucleoside Linkages

[0083] In some embodiments, one or more nucleotides of a TSLP RNAi agent are linked by non-standard linkages or backbones (i.e., modified internucleoside linkages or modified backbones). Modified internucleoside linkages or backbones include, but are not limited to, phosphorothioate groups (represented herein as a lower case “s”), chiral phosphorothioates, thiophosphates, phosphorodithioates, phosphotriesters, aminoalkyl-phosphotriesters, alkyl phosphonates (e.g., methyl phosphonates or 3′-alkylene phosphonates), chiral phosphonates, phosphinates, phosphoramidates (e.g., 3′-amino phosphoramidate, aminoalkylphosphoramidates, or thionophosphoramidates), thionoalkyl-phosphonates, thionoalkylphosphotriesters, morpholino linkages, boranophosphates having normal 3′-5′ linkages, 2′-5′ linked analogs of boranophosphates, or boranophosphates having inverted polarity wherein the adjacent pairs of nucleoside units are linked 3′-5′ to 5′-3′ or 2′-5′ to 5′-2′. In some embodiments, a modified internucleoside linkage or backbone lacks a phosphorus atom. Modified internucleoside linkages lacking a phosphorus atom include, but are not limited to, short chain alkyl or cycloalkyl inter-sugar linkages, mixed heteroatom and alkyl or cycloalkyl inter-sugar linkages, or one or more short chain heteroatomic or heterocyclic inter-sugar linkages. In some embodiments, modified internucleoside backbones include, but are not limited to, siloxane backbones, sulfide backbones, sulfoxide backbones, sulfone backbones, formacetyl and thioformacetyl backbones, methylene formacetyl and thioformacetyl backbones, alkene-containing backbones, sulfamate backbones, methyleneimino and methylenehydrazino backbones, sulfonate and sulfonamide backbones, amide backbones, and other backbones having mixed N, O, S, and CH₂ components.

[0084] In some embodiments, a sense strand of a TSLP RNAi agent can contain 1, 2, 3, 4, 5, or 6 phosphorothioate linkages, an antisense strand of a TSLP RNAi agent can contain 1, 2, 3, 4, 5, or 6 phosphorothioate linkages, or both the sense strand and the antisense strand independently can contain 1, 2, 3, 4, 5, or 6 phosphorothioate linkages. In some embodiments, a sense strand of a TSLP RNAi agent can contain 1, 2, 3, or 4 phosphorothioate linkages, an antisense strand of a TSLP RNAi agent can contain 1, 2, 3, or 4 phosphorothioate linkages, or both the sense strand and the antisense strand independently can contain 1, 2, 3, or 4 phosphorothioate linkages.

[0085] In some embodiments, a TSLP RNAi agent sense strand contains at least two phosphorothioate internucleoside linkages. In some embodiments, the phosphorothioate internucleoside linkages are between the nucleotides at positions 1-3 from the 3′ end of the sense strand. In some embodiments, one phosphorothioate internucleoside linkage is at the 5′ end of the sense strand nucleotide sequence, and another phosphorothioate linkage is at the 3′ end of the sense strand nucleotide sequence. In some embodiments, two phosphorothioate internucleoside linkage are located at the 5′ end of the sense strand, and another phosphorothioate linkage is at the 3′ end of the sense strand. In some embodiments, the sense strand does not include any phosphorothioate internucleoside linkages between the nucleotides, but contains one, two, or three phosphorothioate linkages between the terminal nucleotides on both the 5′ and 3′ ends and the optionally present inverted abasic residue terminal caps. In some embodiments, the targeting ligand is linked to the sense strand via a phosphorothioate linkage.

[0086] In some embodiments, a TSLP RNAi agent antisense strand contains four phosphorothioate internucleoside linkages. In some embodiments, the four phosphorothioate internucleoside linkages are between the nucleotides at positions 1-3 from the 5′ end of the antisense strand and between the nucleotides at positions 19-21, 20-22, 21-23, 22-24, 23-25, or 24-26 from the 5′ end. In some embodiments, three phosphorothioate internucleoside linkages are located between positions 1-4 from the 5′ end of the antisense strand, and a fourth phosphorothioate internucleoside linkage is located between positions 20-21 from the 5′ end of the antisense strand. In some embodiments, a TSLP RNAi agent contains at least three or four phosphorothioate internucleoside linkages in the antisense strand.

### Capping Residues or Moieties

[0087] In some embodiments, the sense strand may include one or more capping residues or moieties, sometimes referred to in the art as a “cap,” a “terminal cap,” or a “capping residue.” As used herein, a “capping residue” is a non-nucleotide compound or other moiety that can be incorporated at one or more termini of a nucleotide sequence of an RNAi agent disclosed herein. A capping residue can provide the RNAi agent, in some instances, with certain beneficial properties, such as, for example, protection against nuclease degradation. In some embodiments, inverted abasic residues (invAb) (also referred to in the art as “inverted abasic sites”) are added as capping residues (see Table 11). (See, e.g., F. Czauderna, Nucleic Acids Res., 2003, 31(11), 2705-16). Capping residues are generally known in the art, and include, for example, inverted abasic residues as well as carbon chains such as a terminal C₃H₇ (propyl), C₆H₁₃ (hexyl), or C₁₂H₂₅ (dodecyl) groups. In some embodiments, a capping residue is present at either the 5′ terminal end, the 3′ terminal end, or both the 5′ and 3′ terminal ends of the sense strand. In some embodiments, the 5′ end and/or the 3′ end of the sense strand may include more than one inverted abasic deoxyribose moiety as a capping residue.

[0088] In some embodiments, one or more inverted abasic residues (invAb) are added to the 3′ end of the sense strand. In some embodiments, one or more inverted abasic residues (invAb) are added to the 5′ end of the sense strand. In some embodiments, one or more inverted abasic residues or inverted abasic sites are inserted between the targeting ligand and the nucleotide sequence of the sense strand of the RNAi agent. In some embodiments, the inclusion of one or more inverted abasic residues or inverted abasic sites at or near the terminal end or terminal ends of the sense strand of an RNAi agent allows for enhanced activity or other desired properties of an RNAi agent.

[0089] In some embodiments, one or more inverted abasic residues (invAb) are added to the 5′ end of the sense strand. In some embodiments, one or more inverted abasic residues can be inserted between the targeting ligand and the nucleotide sequence of the sense strand of the RNAi agent. The inverted abasic residues may be linked via phosphate, phosphorothioate (e.g., shown herein as (invAb)s)), or other internucleoside linkages. In some embodiments, the inclusion of one or more inverted abasic residues at or near the terminal end or terminal ends of the sense strand of an RNAi agent may allow for enhanced activity or other desired properties of an RNAi agent. In some embodiments, an inverted abasic (deoxyribose) residue can be replaced with an inverted ribitol (abasic ribose) residue. In some embodiments, the 3′ end of the antisense strand core stretch sequence, or the 3′ end of the antisense strand sequence, may include an inverted abasic residue. The chemical structures for inverted abasic deoxyribose residues are shown in Table 11 below.

### TSLP RNAi Agents

[0090] The TSLP RNAi agents disclosed herein are designed to target specific positions on a TSLP gene (e.g., SEQ ID NO:1 (NM_0033035.5)). As defined herein, an antisense strand sequence is designed to target a TSLP gene at a given position on the gene when the 5′ terminal nucleobase of the antisense strand is aligned with a position that is 21 nucleotides downstream (towards the 3′ end) from the position on the gene when base pairing to the gene. For example, as illustrated in Tables 1 and 2 herein, an antisense strand sequence designed to target a TSLP gene at position 571 requires that when base pairing to the gene, the 5′ terminal nucleobase of the antisense strand is aligned with position 591 of a TSLP gene.

[0091] As provided herein, a TSLP RNAi agent does not require that the nucleobase at position 1(5′→3′) of the antisense strand be complementary to the gene, provided that there is at least 85% complementarity (e.g., at least 85, 86, 87, 88, 89, 90, 91, 92, 93, 94, 95, 96, 97, 98, 99, or 100% complementarity) of the antisense strand and the gene across a core stretch sequence of at least 16 consecutive nucleotides. For example, for a TSLP RNAi agent disclosed herein that is designed to target position 571 of a TSLP gene, the 5′ terminal nucleobase of the antisense strand of the of the TSLP RNAi agent must be aligned with position 591 of the gene; however, the 5′ terminal nucleobase of the antisense strand may be, but is not required to be, complementary to position 591 of a TSLP gene, provided that there is at least 85% complementarity (e.g., at least 85, 86, 87, 88, 89, 90, 91, 92, 93, 94, 95, 96, 97, 98, 99, or 100% complementarity) of the antisense strand and the gene transcript across a core stretch sequence of at least 16 consecutive nucleotides. As shown by, among other things, the various examples disclosed herein, the specific site of binding of the gene by the antisense strand of the TSLP RNAi agent (e.g., whether the TSLP RNAi agent is designed to target a TSLP gene at position 571, at position 520, at position 570, or at some other position) is an important factor to the level of inhibition achieved and the off-target effects (e.g., potential safety issues) of the TSLP RNAi agent. (See. e.g., Kamola et al., The siRNA Non-seed Region and Its Target Sequences are Auxiliary Determinants of Off-Target Effects. PLOS Computational Biology, 11(12), FIG. 1 (2015)).

[0092] In some embodiments, the TSLP RNAi agents disclosed herein target a TSLP gene at or near the positions of the TSLP sequence shown in Table 1. In some embodiments, the antisense strand of a TSLP RNAi agent disclosed herein includes a core stretch sequence that is fully, substantially, or at least partially complementary to a target TSLP 19-mer sequence disclosed in Table 1.

TABLE 1
TSLP 19-mer mRNA Target Sequences (taken from homo sapiens thymic stromal
lymphopoietin (TSLP) transcript variant 1, GenBank NM_033035.5 (SEQ ID NO: 1))

| | TSLP 19-mer | Corresponding | Targeted Gene |
|---|---|---|---|
| SEQ ID | Target Sequences | Positions of Sequence | Position (as |
| No. | (5′→3′) | on SEQ ID NO: 1 | referred to herein) |
| 2 | UUGCCUUACUGAAAUCCAG | 400-418 | 398 |
| 3 | CUGAAAUCCAGAGCCUAAC | 408-426 | 406 |
| 4 | GAAAUCCAGAGCCUAACCU | 410-428 | 408 |
| 5 | AAUCCAGAGCCUAACCUUC | 412-430 | 410 |
| 6 | CCAGAGCCUAACCUUCAAU | 415-433 | 413 |
| 7 | CAGAGCCUAACCUUCAAUC | 416-434 | 414 |
| 8 | AGAGCCUAACCUUCAAUCC | 417-435 | 415 |
| 9 | GAGCCUAACCUUCAAUCCC | 418-436 | 416 |
| 10 | AGCCUAACCUUCAAUCCCA | 419-437 | 417 |
| 11 | UUCGCCAUGAAAACUAAGG | 470-488 | 468 |
| 12 | GGCUGCCUUAGCUAUCUGG | 487-505 | 485 |
| 13 | AGGCUAUUCGGAAACUCAG | 511-529 | 509 |
| 14 | UAUUCGGAAACUCAGAUAA | 515-533 | 513 |
| 15 | AUUCGGAAACUCAGAUAAA | 516-534 | 514 |
| 16 | UUCGGAAACUCAGAUAAAU | 517-535 | 515 |
| 17 | UCGGAAACUCAGAUAAAUG | 518-536 | 516 |
| 18 | AAACUCAGAUAAAUGCUAA | 522-540 | 520 |
| 19 | GCUACUCAGGCAAUGAAGA | 536-554 | 534 |
| 20 | CUACUCAGGCAAUGAAGAA | 537-555 | 535 |
| 21 | GAAGAGGAGAAAAAGGAAA | 553-571 | 551 |
| 22 | AGGAGAAAAAGGAAAGUCA | 557-575 | 555 |
| 23 | GGAGAAAAAGGAAAGUCAC | 558-576 | 556 |
| 24 | AAAAAGGAAAGUCACAACC | 562-580 | 560 |
| 25 | AAAGGAAAGUCACAACCAA | 564-585 | 562 |
| 26 | AGGAAAGUCACAACCAAUA | 566-584 | 564 |
| 27 | GAAAGUCACAACCAAUAAA | 568-586 | 566 |
| 28 | AAAGUCACAACCAAUAAAU | 569-587 | 567 |
| 29 | AAGUCACAACCAAUAAAUG | 570-588 | 568 |
| 30 | GUCACAACCAAUAAAUGUC | 572-590 | 570 |
| 31 | UCACAACCAAUAAAUGUCU | 573-591 | 571 |
| 32 | AAUGUCUGGAACAAGUGUC | 585-603 | 583 |
| 33 | UGUCUGGAACAAGUGUCAC | 587-605 | 585 |
| 34 | UGGAACAAGUGUCACAAUU | 591-609 | 589 |
| 35 | GGAACAAGUGUCACAAUUA | 592-610 | 590 |
| 36 | GAACAAGUGUCACAAUUAC | 593-611 | 591 |
| 37 | AACAAGUGUCACAAUUACA | 594-612 | 592 |
| 38 | CUUCAAUCGACCUUUACUG | 628-646 | 626 |
| 39 | AGUAAACCAUCUUUAUUAU | 654-672 | 652 |
| 40 | AUAUUUCACAGCACCAAAA | 677-695 | 675 |
| 41 | AACAUUAACUCUAACUGUG | 721-739 | 719 |
| 42 | AGAAGAGUUUCUUAACUUA | 775-793 | 773 |
| 43 | AAGAGUUUCUUAACUUACU | 777-795 | 775 |
| 44 | ACUACUCCUCAAAUGUUGA | 838-856 | 836 |
| 45 | UCCAUAACAUUGAUGACUG | 865-883 | 863 |
| 46 | AUUGAUGACUGGCUUCAUG | 873-891 | 871 |
| 47 | AAUGAUAGCACCUAAACUU | 994-1012 | 992 |
| 48 | GACAGACAUUCCUUCUACA | 1023-1041 | 1021 |
| 49 | GACAUUCCUUCUACAUGUA | 1027-1045 | 1025 |
| 50 | CAUGUAAUGACACUUCUUG | 1040-1058 | 1038 |
| 51 | AUGUAAUGACACUUCUUGU | 1041-1059 | 1039 |
| 52 | UGUAAUGACACUUCUUGUG | 1042-1060 | 1040 |
| 53 | CAAGCAAAGUAUUGUGAAA | 1151-1169 | 1149 |
| 54 | ACAAGUAGAUCCUGAGAAG | 1220-1238 | 1218 |
| 55 | UACCUUUGUUACAGCUACU | 1239-1257 | 1237 |
| 56 | CCUUUGUAAUUGACACUAU | 1328-1346 | 1326 |

[0093] Homo sapiens thymic stromal lymphopoietin (TSLP) transcript variant 1, GenBank NM_033035.5, gene transcript (2610 bases):

| | |
|---|---|
| 1 | atcagggaga ctccaactta aggcaacagc atgggtgaat aagggcttcc tgtggactgg |
| 61 | caatgagagg caaaacctgg tgcttgagca ctggccccta aggcaggcct tacagatctc |
| 121 | ttacactcgt ggtgggaaga gtttagtgtg aaactggggt ggaattgggt gtccacgtat |
| 181 | gttccctttt gccttactat atgttctgtc agtttctttc aggaaaatct tcatcttaca |
| 241 | acttgtaggg ctggtgttaa cttacgactt cactaactgt gactttgaga agattaaagc |
| 301 | agcctatctc agtactattt ctaaagacct gattacatat atgagtggga ccaaaagtac |
| 361 | cgagttcaac aacaccgtct cttgtagcaa tcggccacat tgccttactg aaatccagag |
| 421 | cctaaccttc aatcccaccg ccggctgcgc gtcgctcgcc aaagaaatgt tcgccatgaa |
| 481 | aactaaggct gccttagcta tctggtgccc aggctattcg gaaactcaga taaatgctac |
| 541 | tcaggcaatg aagaagagga gaaaaaggaa agtcacaacc aataaatgtc tggaacaagt |
| 601 | gtcacaatta caaggattgt ggcgtcgctt caatcgacct ttactgaaac aacagtaaac |
| 661 | catctttatt atggtcatat ttcacagcac caaaataaat catctttatt aagtagatga |
| 721 | aacattaact ctaactgtga caaagaagac cacaaatagt tatcttttaa ttacagaaga |
| 781 | gtttcttaac ttacttttgt aagtttttat tgtgtaagtt tataatgcag gggaagtact |
| 841 | actcctcaaa tgttgaggga agcttccata acattgatga ctggcttcat ggcagtaatt |
| 901 | ctcggctgta gttgcataag cattgctcaa gaggaaaatc caaaagtgca gcaggagaac |
| 961 | tcttttccct gaaaaaggaa aaatattgaa ctcaatgata gcacctaaac ttacatttaa |
| 1021 | aagacagaca ttccttctac atgtaatgac acttcttgtg ttaaactaaa aatttacaag |
| 1081 | agaagaaagt gaaagcaaat ggggtttcac aaatagttgt aaatatagtg aagcaatttg |
| 1141 | aaataatttt caagcaaagt attgtgaaag tattctaagc caagttttaa atattatcta |
| 1201 | acagacaaga gtggtatata caagtagatc ctgagaagta cctttgttac agctactata |
| 1261 | aatatacata taaattatag aatctacttt aatttatttt gtgaacactt ttgaaaatgt |
| 1321 | acatgttcct ttgtaattga cactatatat ttcttaataa aataattctc aaatttgttt |
| 1381 | cttatgaatc atctctcaaa tctagttaga caatttgcac acatactttt ctaagggaca |
| 1441 | ttatcttcct tcaggttttt acctccactc atccttagag cccactgact gctccccttt |
| 1501 | atacctgttg gccctgccta taggagagaa tatttggaga taggcagctt caggatgcat |
| 1561 | tgcaatcatc cttttcttaa attatgtcac tagtctttta ttttttcccc tcttgaactt |
| 1621 | tcctcacacc tggaagaaac aaagtaggaa aaagtgaaca ggggatgtca aatcgattct |
| 1681 | tgaattcccg ctgcaagcta gagccgcagg caccctctca ctcaatttcc actcagaacc |
| 1741 | ctataaacac cagtgggaag ggcaacccac tgcacgtggg aatgcactga tttttcctag |
| 1801 | gagtagacat gttcctctaa ttactccctg agggttagtt ggggctaaac catgacagaa |
| 1861 | gtggggaagt tcaatgtcct taaatccatc ttacttgcca acaggtaaga ggaagcttac |
| 1921 | attacatgtc cagtccacat ttaaagagca cttactgtgg aacaagcctt cagccaaaca |
| 1981 | atggggatag aaaagtaggt aagactcagc ctttgtccag agaagctcag ggtatagctg |
| 2041 | aataggcagt ttcttttgtc ctgaggaaaa tcaggacatg cctgctttct aaaaatcttc |
| 2101 | ctctgaagac ctgacccaag ctcttaaatg ctattgtaag agaaatttct ttgtctatta |
| 2161 | actccatttt agtagggatt cactgactag attttactga actatgaaaa taaatacaca |
| 2221 | taatttttca caaaattttg ggcccaattc ccctaaaaga attgaggatt agggagaaag |
| 2281 | gagacaactc aaagtcatcc cattaagtgc agtttctttg aatcttctgc tttatcttta |
| 2341 | aaaatttgta taatttatat attttattct atgtgttcca tagatatctt aatgtaaaat |
| 2401 | tagtcattta aattacactg tcaattaaaa gtaatgggca agagattgca tcatactaat |
| 2461 | ttagtaagaa cgttcccaaa tgttgtaaca atgtggatca tacatctctg gttttttaaa |
| 2521 | tgtattgagg ctttcttggt ggactagtat agtatacggt cagttatgtc aatgtttcat |
| 2581 | ggtcaataaa aaggaagttg caaattgtga |

[0094] In some embodiments, a TSLP RNAi agent includes an antisense strand wherein position 19 of the antisense strand (5′→3′) is capable of forming a base pair with position 1 of a 19-mer target sequence disclosed in Table 1. In some embodiments, a TSLP agent includes an antisense strand wherein position 1 of the antisense strand (5′→3′) is capable of forming a base pair with position 19 of a 19-mer target sequence disclosed in Table 1.

[0095] In some embodiments, a TSLP agent includes an antisense strand wherein position 2 of the antisense strand (5′→3′) is capable of forming a base pair with position 18 of a 19-mer target sequence disclosed in Table 1. In some embodiments, a TSLP agent includes an antisense strand wherein positions 2 through 18 of the antisense strand (5′→3′) are capable of forming base pairs with each of the respective complementary bases located at positions 18 through 2 of the 19-mer target sequence disclosed in Table 1.

[0096] For the RNAi agents disclosed herein, the nucleotide at position 1 of the antisense strand (from 5′ end→3′ end) can be perfectly complementary to a TSLP gene, or can be non-complementary to a TSLP gene. In some embodiments, the nucleotide at position 1 of the antisense strand (from 5′ end→3′ end) is a U, A, or dT. In some embodiments, the nucleotide at position 1 of the antisense strand (from 5′ end→3′ end) forms an A:U or U:A base pair with the sense strand.

[0097] In some embodiments, a TSLP RNAi agent antisense strand comprises the sequence of nucleotides (from 5′ end→3′ end) 2-18 or 2-19 of any of the antisense strand sequences in Table 2 or Table 3. In some embodiments, a TSLP RNAi sense strand comprises the sequence of nucleotides (from 5′ end→3′ end) 1-17, 1-18, or 2-18 of any of the sense strand sequences in Table 2, Table 4, Table 5, or Table 6.

[0098] In some embodiments, a TSLP RNAi agent is comprised of (i) an antisense strand comprising the sequence of nucleotides (from 5′ end→3′ end) 2-18 or 2-19 of any of the antisense strand sequences in Table 2 or Table 3, and (ii) a sense strand comprising the sequence of nucleotides (from 5′ end→3′ end) 1-17 or 1-18 of any of the sense strand sequences in Table 2, Table 4, Table 5, or Table 6.

[0099] In some embodiments, the TSLP RNAi agents include core 19-mer nucleotide sequences shown in the following Table 2.

TABLE 2
TSLP RNAi Agent Antisense Strand and Sense Strand Core Stretch Base Sequences

| | | | | Corresponding | |
|---|---|---|---|---|---|
| | Antisense Strand Base | | Sense Strand Base | Positions of | |
| | Sequence (5′→3′) | | Sequence (5′→3′) | Identified | Targeted |
| SEQ ID | (Shown as an Unmodified | SEQ ID | (Shown as an Unmodified | Sequence on | Gene |
| NO:. | Nucleotide Sequence) | NO:. | Nucleotide Sequence) | SEQ ID NO: 1 | Position |
| 57 | CUGGAUUUCAGUAAGGCAA | 322 | UUGCCUUACUGAAAUCCAG | 400-418 | 398 |
| 58 | UUGGAUUUCAGUAACCGUU | 323 | UUGCCUUACUGAAAUCCAA | 400-418 | 398 |
| 59 | NUGGAUUUCAGUAACCGUU | 324 | UUGCCUUACUGAAAUCCAN | 400-418 | 398 |
| 60 | UUGGAUUUCAGUAACCGUN | 325 | NUGCCUUACUGAAAUCCAA | 400-418 | 398 |
| 61 | NUGGAUUUCAGUAACCGUN | 326 | NUGCCUUACUGAAAUCCAN | 400-418 | 398 |
| 62 | GUUAGGCUCUGGAUUUCAG | 327 | CUGAAAUCCAGAGCCUAAC | 408-426 | 406 |
| 63 | UUUAGGCUCUGGAUUUCAG | 328 | CUGAAAUCCAGAGCCUAAA | 408-426 | 406 |
| 64 | NUUAGGCUCUGGAUUUCAG | 329 | CUGAAAUCCAGAGCCUAAN | 408-426 | 406 |
| 65 | UUUAGGCUCUGGAUUUCAN | 330 | NUGAAAUCCAGAGCCUAAA | 408-426 | 406 |
| 66 | NUUAGGCUCUGGAUUUCAN | 331 | NUGAAAUCCAGAGCCUAAN | 408-426 | 406 |
| 67 | AGGUUAGGCUCUGGAUUUC | 332 | GAAAUCCAGAGCCUAACCU | 410-428 | 408 |
| 68 | UGGUUAGGCUCUGGAUUUC | 333 | GAAAUCCAGAGCCUAACCA | 410-428 | 408 |
| 69 | NGGUUAGGCUCUGGAUUUC | 334 | GAAAUCCAGAGCCUAACCN | 410-428 | 408 |
| 70 | NGGUUAGGCUCUGGAUUUN | 335 | NAAAUCCAGAGCCUAACCN | 410-428 | 408 |
| 71 | AGGUUAGGCUCUGGAUUUC | 336 | GAAAUCCAGAGCCUAACCU | 410-428 | 408 |
| 72 | GAAGGUUAGGCUCUGGAUU | 337 | AAUCCAGAGCCUAACCUUC | 412-430 | 410 |
| 73 | UAAGGUUAGGCUCUGGAUU | 338 | AAUCCAGAGCCUAACCUUA | 412-430 | 410 |
| 74 | NAAGGUUAGGCUCUGGAUU | 339 | AAUCCAGAGCCUAACCUUN | 412-430 | 410 |
| 75 | UAAGGUUAGGCUCUGGAUN | 340 | AAUCCAGAGCCUAACCUUN | 412-430 | 410 |
| 76 | NAAGGUUAGGCUCUGGAUN | 341 | NAUCCAGAGCCUAACCUUN | 412-430 | 410 |
| 77 | AUUGAAGGUUAGGCUCUGG | 342 | CCAGAGCCUAACCUUCAAU | 415-433 | 413 |
| 78 | UUUGAAGGUUAGGCUCUGG | 343 | CCAGAGCCUAACCUUCAAA | 415-433 | 413 |
| 79 | NUUGAAGGUUAGGCUCUGG | 344 | CCAGAGCCUAACCUUCAAN | 415-433 | 413 |
| 80 | AUUGAAGGUUAGGCUCUGN | 345 | NCAGAGCCUAACCUUCAAU | 415-433 | 413 |
| 81 | NUUGAAGGUUAGGCUCUGN | 346 | NCAGAGCCUAACCUUCAAN | 415-433 | 413 |
| 82 | GAUUGAAGGUUAGGCUCUG | 347 | CAGAGCCUAACCUUCAAUC | 416-434 | 414 |
| 83 | AAUUGAAGGUUAGGCUCUG | 348 | CAGAGCCUAACCUUCAAUU | 416-434 | 414 |
| 84 | UAUUGAAGGUUAGGCUCUG | 349 | CAGAGCCUAACCUUCAAUA | 416-434 | 414 |
| 85 | NAUUGAAGGUUAGGCUCUG | 350 | CAGAGCCUAACCUUCAAUN | 416-434 | 414 |
| 86 | NAUUGAAGGUUAGGCUCUN | 351 | NAGAGCCUAACCUUCAAUN | 416-434 | 414 |
| 87 | GGAUUGAAGGUUAGGCUCU | 352 | AGAGCCUAACCUUCAAUCC | 417-435 | 415 |
| 88 | AGAUUGAAGGUUAGGCUCU | 353 | AGAGCCUAACCUUCAAUCU | 417-435 | 415 |
| 89 | UGAUUGAAGGUUAGGCUCU | 354 | AGAGCCUAACCUUCAAUCA | 417-435 | 415 |
| 90 | NGAUUGAAGGUUAGGCUCU | 355 | AGAGCCUAACCUUCAAUCN | 417-435 | 415 |
| 91 | NGAUUGAAGGUUAGGCUCN | 356 | NGAGCCUAACCUUCAAUCN | 417-435 | 415 |
| 92 | GGGAUUGAAGGUUAGGCUC | 357 | GAGCCUAACCUUCAAUCCC | 418-436 | 416 |
| 93 | AGGAUUGAAGGUUAGGCUC | 358 | GAGCCUAACCUUCAAUCCU | 418-436 | 416 |
| 94 | UGGAUUGAAGGUUAGGCUC | 359 | GAGCCUAACCUUCAAUCCA | 418-436 | 416 |
| 95 | NGGAUUGAAGGUUAGGCUC | 360 | GAGCCUAACCUUCAAUCCN | 418-436 | 416 |
| 96 | NGGAUUGAAGGUUAGGCUN | 361 | NAGCCUAACCUUCAAUCCN | 418-436 | 416 |
| 97 | UGGGAUUGAAGGUUAGGCU | 362 | AGCCUAACCUUCAAUCCCA | 419-437 | 417 |
| 98 | NGGGAUUGAAGGUUAGGCU | 363 | AGCCUAACCUUCAAUCCCN | 419-437 | 417 |
| 99 | UGGGAUUGAAGGUUAGGCN | 364 | NGCCUAACCUUCAAUCCCA | 419-437 | 417 |
| 100 | NGGGAUUGAAGGUUAGGCN | 365 | NGCCUAACCUUCAAUCCCN | 419-437 | 417 |
| 101 | CCUUAGUUUUCAUGGCGAA | 366 | UUCGCCAUGAAAACUAAGG | 470-488 | 468 |
| 102 | ACUUAGUUUUCAUGGCGAA | 367 | UUCGCCAUGAAAACUAAGU | 470-488 | 468 |
| 103 | UCUUAGUUUUCAUGGCGAA | 368 | UUCGCCAUGAAAACUAAGA | 470-488 | 468 |
| 104 | NCUUAGUUUUCAUGGCGAA | 369 | UUCGCCAUGAAAACUAAGN | 470-488 | 468 |
| 105 | NCUUAGUUUUCAUGGCGAN | 370 | NUCGCCAUGAAAACUAAGN | 470-488 | 468 |
| 106 | CCAGAUAGCUAAGGCAGCC | 371 | GGCUGCCUUAGCUAUCUGG | 487-505 | 485 |
| 107 | ACAGAUAGCUAAGGCAGCC | 372 | GGCUGCCUUAGCUAUCUGU | 487-505 | 485 |
| 108 | UCAGAUAGCUAAGGCAGCC | 373 | GGCUGCCUUAGCUAUCUGA | 487-505 | 485 |
| 109 | NCAGAUAGCUAAGGCAGCC | 374 | GGCUGCCUUAGCUAUCUGN | 487-505 | 485 |
| 110 | NCAGAUAGCUAAGGCAGCN | 375 | NGCUGCCUUAGCUAUCUGN | 487-505 | 485 |
| 111 | CUGAGUUUCCGAAUAGCCU | 376 | AGGCUAUUCGGAAACUCAG | 511-529 | 509 |
| 112 | AUGAGUUUCCGAAUAGCCU | 377 | AGGCUAUUCGGAAACUCAU | 511-529 | 509 |
| 113 | UUGAGUUUCCGAAUAGCCU | 378 | AGGCUAUUCGGAAACUCAA | 511-529 | 509 |
| 114 | NUGAGUUUCCGAAUAGCCU | 379 | AGGCUAUUCGGAAACUCAN | 511-529 | 509 |
| 115 | NUGAGUUUCCGAAUAGCCN | 380 | NGGCUAUUCGGAAACUCAN | 511-529 | 509 |
| 116 | UUAUCUGAGUUUCCGAAUA | 381 | UAUUCGGAAACUCAGAUAA | 515-533 | 513 |
| 117 | AUAUCUGAGUUUCCGAAUA | 382 | UAUUCGGAAACUCAGAUAU | 515-533 | 513 |
| 118 | NUAUCUGAGUUUCCGAAUA | 383 | UAUUCGGAAACUCAGAUAN | 515-533 | 513 |
| 119 | NUAUCUGAGUUUCCGAAUN | 384 | NAUUCGGAAACUCAGAUAN | 515-533 | 513 |
| 120 | UUUAUCUGAGUUUCCGAAU | 385 | AUUCGGAAACUCAGAUAAA | 516-534 | 514 |
| 121 | AUUAUCUGAGUUUCCGAAU | 386 | AUUCGGAAACUCAGAUAAU | 516-534 | 514 |
| 122 | NUUAUCUGAGUUUCCGAAU | 387 | AUUCGGAAACUCAGAUAAN | 516-534 | 514 |
| 123 | NUUAUCUGAGUUUCCGAAN | 388 | NUUCGGAAACUCAGAUAAN | 516-534 | 514 |
| 124 | AUUUAUCUGAGUUUCCGAA | 389 | UUCGGAAACUCAGAUAAAU | 517-535 | 515 |
| 125 | NUUUAUCUGAGUUUCCGAA | 390 | UUCGGAAACUCAGAUAAAN | 517-535 | 515 |
| 126 | AUUUAUCUGAGUUUCCGAN | 391 | NUCGGAAACUCAGAUAAAU | 517-535 | 515 |
| 127 | NUUUAUCUGAGUUUCCGAN | 392 | NUCGGAAACUCAGAUAAAN | 517-535 | 515 |
| 128 | AUUUAUCUGAGUUUCCGAA | 393 | UUCGGAAACUCAGAUAA(A^{2N})U | 517-535 | 515 |
| 129 | NUUUAUCUGAGUUUCCGAA | 394 | UUCGGAAACUCAGAUAA(A^{2N})N | 517-535 | 515 |
| 130 | AUUUAUCUGAGUUUCCGAN | 395 | NUCGGAAACUCAGAUAA(A^{2N})U | 517-535 | 515 |
| 131 | NUUUAUCUGAGUUUCCGAN | 396 | NUCGGAAACUCAGAUAA(A^{2N})N | 517-535 | 515 |
| 132 | CAUUUAUCUGAGUUUCCGA | 397 | UCGGAAACUCAGAUAAAUG | 518-536 | 516 |
| 133 | AAUUUAUCUGAGUUUCCGA | 398 | UCGGAAACUCAGAUAAAUA | 518-536 | 516 |
| 134 | UAUUUAUCUGAGUUUCCGA | 399 | UCGGAAACUCAGAUAAAUU | 518-536 | 516 |
| 135 | NAUUUAUCUGAGUUUCCGA | 400 | UCGGAAACUCAGAUAAAUN | 518-536 | 516 |
| 136 | NAUUUAUCUGAGUUUCCGN | 401 | NCGGAAACUCAGAUAAAUN | 518-536 | 516 |
| 137 | UUAGCAUUUAUCUGAGUUU | 402 | AAACUCAGAUAAAUGCUAA | 522-540 | 520 |
| 138 | NUAGCAUUUAUCUGAGUUU | 403 | AAACUCAGAUAAAUGCUAN | 522-540 | 520 |
| 139 | UUAGCAUUUAUCUGAGUUC | 404 | GAACUCAGAUAAAUGCUAA | 522-540 | 520 |
| 140 | UUAGCAUUUAUCUGAGUUC | 405 | G(A^{2N})ACUCAGAUAAAUGCUAA | 522-540 | 520 |
| 141 | UUAGCAUUUAUCUGAGUUN | 406 | NAACUCAGAUAAAUGCUAA | 522-540 | 520 |
| 142 | NUAGCAUUUAUCUGAGUUN | 407 | NAACUCAGAUAAAUGCUAN | 522-540 | 520 |
| 143 | UUAGCAUUUAUCUGAGUUN | 408 | N(A^{2N})ACUCAGAUAAAUGCUAA | 522-540 | 520 |
| 144 | NUAGCAUUUAUCUGAGUUN | 409 | N(A^{2N})ACUCAGAUAAAUGCUAN | 522-540 | 520 |
| 145 | UCUUCAUUGCCUGAGUAGC | 410 | GCUACUCAGGCAAUGAAGA | 536-554 | 534 |
| 146 | ACUUCAUUGCCUGAGUAGC | 411 | GCUACUCAGGCAAUGAAGU | 536-554 | 534 |
| 147 | NCUUCAUUGCCUGAGUAGC | 412 | GCUACUCAGGCAAUGAAGN | 536-554 | 534 |
| 148 | NCUUCAUUGCCUGAGUAGN | 413 | NCUACUCAGGCAAUGAAGN | 536-554 | 534 |
| 149 | UUCUUCAUUGCCUGAGUAG | 414 | CUACUCAGGCAAUGAAGAA | 537-555 | 535 |
| 150 | AUCUUCAUUGCCUGAGUAG | 415 | CUACUCAGGCAAUGAAGAU | 537-555 | 535 |
| 151 | NUCUUCAUUGCCUGAGUAG | 416 | CUACUCAGGCAAUGAAGAN | 537-555 | 535 |
| 152 | NUCUUCAUUGCCUGAGUAN | 417 | NUACUCAGGCAAUGAAGAN | 537-555 | 535 |
| 153 | UUUAUUGGUUGUGACUUUC | 418 | CUACUCAGGCAAUGAAGAA | 537-555 | 535 |
| 154 | AUUUAUUGGUUGUGACUUU | 419 | GAAGAGGAGAAAAAGGAAA | 553-571 | 551 |
| 155 | UGACUUUCCUUUUUCUCCU | 420 | AGGAGAAAAAGGAAAGUCA | 557-575 | 555 |
| 156 | AGACUUUCCUUUUUCUCCU | 421 | AGGAGAAAAAGGAAAGUCN | 557-575 | 555 |
| 157 | NGACUUUCCUUUUUCUCCU | 422 | AGGAGAAAAAGGAAAGUCN | 557-575 | 555 |
| 158 | NGACUUUCCUUUUUCUCCN | 423 | NGGAGAAAAAGGAAAGUCN | 557-575 | 555 |
| 159 | UUGACUUUCCUUUUUCUCC | 424 | GGAGAAAAAGGAAAGUCAC | 558-576 | 556 |
| 160 | GGUUGUGACUUUCCUUUUU | 425 | AAAAAGGAAAGUCACAACC | 562-580 | 560 |
| 161 | AGUUGUGACUUUCCUUUUU | 426 | AAAAAGGAAAGUCACAACU | 562-580 | 560 |
| 162 | UGUUGUGACUUUCCUUUUU | 427 | AAAAAGGAAAGUCACAACA | 562-580 | 560 |
| 163 | NGUUGUGACUUUCCUUUUU | 428 | AAAAAGGAAAGUCACAACN | 562-580 | 560 |
| 164 | NGUUGUGACUUUCCUUUUN | 429 | NAAAAGGAAAGUCACAACN | 562-580 | 560 |
| 165 | UUGGUUGUGACUUUCCUUU | 430 | AAAGGAAAGUCACAACCAA | 564-585 | 562 |
| 166 | AUGGUUGUGACUUUCCUUU | 431 | AAAGGAAAGUCACAACCAU | 564-585 | 562 |
| 167 | NUGGUUGUGACUUUCCUUU | 432 | AAAGGAAAGUCACAACCAN | 564-585 | 562 |
| 168 | NUGGUUGUGACUUUCCUUN | 433 | NAAGGAAAGUCACAACCAN | 564-585 | 562 |
| 169 | UAUUGGUUGUGACUUUCCU | 434 | AGGAAAGUCACAACCAAUA | 566-584 | 564 |
| 170 | AAUUGGUUGUGACUUUCCU | 435 | AGGAAAGUCACAACCAAUU | 566-584 | 564 |
| 171 | NAUUGGUUGUGACUUUCCU | 436 | AGGAAAGUCACAACCAAUN | 566-584 | 564 |
| 172 | NAUUGGUUGUGACUUUCCN | 437 | NGGAAAGUCACAACCAAUN | 566-584 | 564 |
| 173 | UUUAUUGGUUGUGACUUUC | 438 | GAAAGUCACAACCAAUAAA | 568-586 | 566 |
| 174 | AUUAUUGGUUGUGACUUUC | 439 | GAAAGUCACAACCAAUAAU | 568-586 | 566 |
| 175 | NUUAUUGGUUGUGACUUUC | 440 | GAAAGUCACAACCAAUAAN | 568-586 | 566 |
| 176 | NUUAUUGGUUGUGACUUUN | 441 | NAAAGUCACAACCAAUAAN | 568-586 | 566 |
| 177 | AUUUAUUGGUUGUGACUUU | 442 | AAAGUCACAACCAAUAAAU | 569-587 | 567 |
| 178 | UUUUAUUGGUUGUGACUUU | 443 | AAAGUCACAACCAAUAAAA | 569-587 | 567 |
| 179 | NUUUAUUGGUUGUGACUUU | 444 | AAAGUCACAACCAAUAAAN | 569-587 | 567 |
| 180 | NUUUAUUGGUUGUGACUUN | 445 | NAAGUCACAACCAAUAAAN | 569-587 | 567 |
| 181 | CAUUUAUUGGUUGUGACUU | 446 | AAGUCACAACCAAUAAAUG | 570-588 | 568 |
| 182 | UAUUUAUUGGUUGUGACUU | 447 | AAGUCACAACCAAUAAAUA | 570-588 | 568 |
| 183 | NAUUUAUUGGUUGUGACUU | 448 | AAGUCACAACCAAUAAAUN | 570-588 | 568 |
| 184 | UAUUUAUUGGUUGUGACUN | 449 | NAGUCACAACCAAUAAAUA | 570-588 | 568 |
| 185 | NAUUUAUUGGUUGUGACUN | 450 | NAGUCACAACCAAUAAAUN | 570-588 | 568 |
| 186 | CAUUUAUUGGUUGUGACUU | 451 | AAGUCACAACCAAUAA(A^{2N})UG | 570-588 | 568 |
| 187 | UAUUUAUUGGUUGUGACUU | 452 | AAGUCACAACCAAUAA(A^{2N})UA | 570-588 | 568 |
| 188 | NAUUUAUUGGUUGUGACUU | 453 | AAGUCACAACCAAUAA(A^{2N})UN | 570-588 | 568 |
| 189 | UAUUUAUUGGUUGUGACUN | 454 | NAGUCACAACCAAUAA(A^{2N})UA | 570-588 | 568 |
| 190 | NAUUUAUUGGUUGUGACUN | 455 | NAGUCACAACCAAUAA(A^{2N})UN | 570-588 | 568 |
| 191 | GACAUUUAUUGGUUGUGAC | 456 | GUCACAACCAAUAAAUGUC | 572-590 | 570 |
| 192 | UACAUUUAUUGGUUGUGAC | 457 | GUCACAACCAAUAAAUGUA | 572-590 | 570 |
| 193 | NACAUUUAUUGGUUGUGAC | 458 | GUCACAACCAAUAAAUGUN | 572-590 | 570 |
| 194 | UACAUUUAUUGGUUGUGAN | 459 | NUCACAACCAAUAAAUGUA | 572-590 | 570 |
| 195 | NACAUUUAUUGGUUGUGAN | 460 | NUCACAACCAAUAAAUGUN | 572-590 | 570 |
| 196 | AGACAUUUAUUGGUUGUGA | 461 | UCACAACCAAUAAAUGUCU | 573-591 | 571 |
| 197 | UGACAUUUAUUGGUUGUGA | 462 | UCACAACCAAUAAAUGUCA | 573-591 | 571 |
| 198 | NGACAUUUAUUGGUUGUGA | 463 | UCACAACCAAUAAAUGUCN | 573-591 | 571 |
| 199 | UGACAUUUAUUGGUUGUGN | 464 | NCACAACCAAUAAAUGUCA | 573-591 | 571 |
| 200 | AGACAUUUAUUGGUUGUGN | 465 | NCACAACCAAUAAAUGUCU | 573-591 | 571 |
| 201 | NGACAUUUAUUGGUUGUGN | 466 | NCACAACCAAUAAAUGUCN | 573-591 | 571 |
| 202 | AGACGUUUAUUGGUUGUGA | 467 | UCACAACCAAUAAAUGUCU | 573-591 | 571 |
| 203 | UGACGUUUAUUGGUUGUGA | 468 | UCACAACCAAUAAAUGUCA | 573-591 | 571 |
| 204 | NGACGUUUAUUGGUUGUGA | 469 | UCACAACCAAUAAAUGUCN | 573-591 | 571 |
| 205 | UGACGUUUAUUGGUUGUGN | 470 | NCACAACCAAUAAAUGUCA | 573-591 | 571 |
| 206 | NGACGUUUAUUGGUUGUGN | 471 | NCACAACCAAUAAAUGUCN | 573-591 | 571 |
| 207 | AGACGUUUAUUGGUUGUGA | 472 | UCACAACCAAUAAACGUCU | 573-591 | 571 |
| 208 | UGACGUUUAUUGGUUGUGA | 473 | UCACAACCAAUAAACGUCA | 573-591 | 571 |
| 209 | AGACGUUUAUUGGUUGUGN | 474 | NCACAACCAAUAAACGUCU | 573-591 | 571 |
| 210 | NGACGUUUAUUGGUUGUGA | 475 | UCACAACCAAUAAACGUCN | 573-591 | 571 |
| 211 | NGACGUUUAUUGGUUGUGN | 476 | NCACAACCAAUAAACGUCN | 573-591 | 571 |
| 212 | GACACUUGUUCCAGACAUU | 477 | AAUGUCUGGAACAAGUGUC | 585-603 | 583 |
| 213 | UACACUUGUUCCAGACAUU | 478 | AAUGUCUGGAACAAGUGUA | 585-603 | 583 |
| 214 | AACACUUGUUCCAGACAUU | 479 | AAUGUCUGGAACAAGUGUU | 585-603 | 583 |
| 215 | NACACUUGUUCCAGACAUU | 480 | AAUGUCUGGAACAAGUGUN | 585-603 | 583 |
| 216 | NACACUUGUUCCAGACAUN | 481 | NAUGUCUGGAACAAGUGUN | 585-603 | 583 |
| 217 | GUGACACUUGUUCCAGACA | 482 | UGUCUGGAACAAGUGUCAC | 587-605 | 585 |
| 218 | UUGACACUUGUUCCAGACA | 483 | UGUCUGGAACAAGUGUCAA | 587-605 | 585 |
| 219 | AUGACACUUGUUCCAGACA | 484 | UGUCUGGAACAAGUGUCAU | 587-605 | 585 |
| 220 | NUGACACUUGUUCCAGACA | 485 | UGUCUGGAACAAGUGUCAN | 587-605 | 585 |
| 221 | NUGACACUUGUUCCAGACN | 486 | NGUCUGGAACAAGUGUCAN | 587-605 | 585 |
| 222 | AAUUGUGACACUUGUUCCA | 487 | UGGAACAAGUGUCACAAUU | 591-609 | 589 |
| 223 | UAUUGUGACACUUGUUCCA | 488 | UGGAACAAGUGUCACAAUA | 591-609 | 589 |
| 224 | NAUUGUGACACUUGUUCCA | 489 | UGGAACAAGUGUCACAAUN | 591-609 | 589 |
| 225 | NAUUGUGACACUUGUUCCN | 490 | NGGAACAAGUGUCACAAUN | 591-609 | 589 |
| 226 | UAAUUGUGACACUUGUUCC | 491 | GGAACAAGUGUCACAAUUA | 592-610 | 590 |
| 227 | AAAUUGUGACACUUGUUCC | 492 | GGAACAAGUGUCACAAUUU | 592-610 | 590 |
| 228 | NAAUUGUGACACUUGUUCC | 493 | GGAACAAGUGUCACAAUUN | 592-610 | 590 |
| 229 | NAAUUGUGACACUUGUUCN | 494 | NGAACAAGUGUCACAAUUN | 592-610 | 590 |
| 230 | GUAAUUGUGACACUUGUUC | 495 | GAACAAGUGUCACAAUUAC | 593-611 | 591 |
| 231 | UUAAUUGUGACACUUGUUC | 496 | GAACAAGUGUCACAAUUAA | 593-611 | 591 |
| 232 | AUAAUUGUGACACUUGUUC | 497 | GAACAAGUGUCACAAUUAU | 593-611 | 591 |
| 233 | NUAAUUGUGACACUUGUUC | 498 | GAACAAGUGUCACAAUUAN | 593-611 | 591 |
| 234 | NUAAUUGUGACACUUGUUN | 499 | NAACAAGUGUCACAAUUAN | 593-611 | 591 |
| 235 | UGUAAUUGUGACACUUGUU | 500 | AACAAGUGUCACAAUUACA | 594-612 | 592 |
| 236 | AGUAAUUGUGACACUUGUU | 501 | AACAAGUGUCACAAUUACU | 594-612 | 592 |
| 237 | NGUAAUUGUGACACUUGUU | 502 | AACAAGUGUCACAAUUACN | 594-612 | 592 |
| 238 | NGUAAUUGUGACACUUGUN | 503 | NACAAGUGUCACAAUUACN | 594-612 | 592 |
| 239 | CAGUAAAGGUCGAUUGAAG | 504 | CUUCAAUCGACCUUUACUG | 628-646 | 626 |
| 240 | UAGUAAAGGUCGAUUGAAG | 505 | CUUCAAUCGACCUUUACUA | 628-646 | 626 |
| 241 | AAGUAAAGGUCGAUUGAAG | 506 | CUUCAAUCGACCUUUACUU | 628-646 | 626 |
| 242 | NAGUAAAGGUCGAUUGAAG | 507 | CUUCAAUCGACCUUUACUN | 628-646 | 626 |
| 243 | NAGUAAAGGUCGAUUGAAN | 508 | NUUCAAUCGACCUUUACUN | 628-646 | 626 |
| 244 | AUAAUAAAGAUGGUUUACU | 509 | AGUAAACCAUCUUUAUUAU | 654-672 | 652 |
| 245 | UUAAUAAAGAUGGUUUACU | 510 | AGUAAACCAUCUUUAUUAA | 654-672 | 652 |
| 246 | NUAAUAAAGAUGGUUUACU | 511 | AGUAAACCAUCUUUAUUAN | 654-672 | 652 |
| 247 | NUAAUAAAGAUGGUUUACN | 512 | NGUAAACCAUCUUUAUUAN | 654-672 | 652 |
| 248 | UUUUGGUGCUGUGAAAUAU | 513 | AUAUUUCACAGCACCAAAA | 677-695 | 675 |
| 249 | AUUUGGUGCUGUGAAAUAU | 514 | AUAUUUCACAGCACCAAAU | 677-695 | 675 |
| 250 | NUUUGGUGCUGUGAAAUAU | 515 | AUAUUUCACAGCACCAAAN | 677-695 | 675 |
| 251 | NUUUGGUGCUGUGAAAUAN | 516 | NUAUUUCACAGCACCAAAN | 677-695 | 675 |
| 252 | CACAGUUAGAGUUAAUGUU | 517 | AACAUUAACUCUAACUGUG | 721-739 | 719 |
| 253 | UACAGUUAGAGUUAAUGUU | 518 | AACAUUAACUCUAACUGUA | 721-739 | 719 |
| 254 | AACAGUUAGAGUUAAUGUU | 519 | AACAUUAACUCUAACUGUU | 721-739 | 719 |
| 255 | NACAGUUAGAGUUAAUGUU | 520 | AACAUUAACUCUAACUGUN | 721-739 | 719 |
| 256 | NACAGUUAGAGUUAAUGUN | 521 | NACAUUAACUCUAACUGUN | 721-739 | 719 |
| 257 | UAAGUUAAGAAACUCUUCU | 522 | AGAAGAGUUUCUUAACUUA | 775-793 | 773 |
| 258 | AAAGUUAAGAAACUCUUCU | 523 | AGAAGAGUUUCUUAACUUU | 775-793 | 773 |
| 259 | NAAGUUAAGAAACUCUUCU | 524 | AGAAGAGUUUCUUAACUUN | 775-793 | 773 |
| 260 | NAAGUUAAGAAACUCUUCN | 525 | NGAAGAGUUUCUUAACUUN | 775-793 | 773 |
| 261 | AGUAAGUUAAGAAACUCUU | 526 | AAGAGUUUCUUAACUUACU | 777-795 | 775 |
| 262 | UGUAAGUUAAGAAACUCUU | 527 | AAGAGUUUCUUAACUUACA | 777-795 | 775 |
| 263 | AGUAAGUUAAGAAACUCUU | 528 | AAGAGUUUCUUAACUUACU | 777-795 | 775 |
| 264 | NGUAAGUUAAGAAACUCUN | 529 | NAGAGUUUCUUAACUUACN | 777-795 | 775 |
| 265 | UCAACAUUUGAGGAGUAGU | 530 | ACUACUCCUCAAAUGUUGA | 838-856 | 836 |
| 266 | ACAACAUUUGAGGAGUAGU | 531 | ACUACUCCUCAAAUGUUGU | 838-856 | 836 |
| 267 | NCAACAUUUGAGGAGUAGU | 532 | ACUACUCCUCAAAUGUUGN | 838-856 | 836 |
| 268 | NCAACAUUUGAGGAGUAGN | 533 | NCUACUCCUCAAAUGUUGN | 838-856 | 836 |
| 269 | CAGUCAUCAAUGUUAUGGA | 534 | UCCAUAACAUUGAUGACUG | 865-883 | 863 |
| 270 | UAGUCAUCAAUGUUAUGGA | 535 | UCCAUAACAUUGAUGACUA | 865-883 | 863 |
| 271 | AAGUCAUCAAUGUUAUGGA | 536 | UCCAUAACAUUGAUGACUU | 865-883 | 863 |
| 272 | NAGUCAUCAAUGUUAUGGA | 537 | UCCAUAACAUUGAUGACUN | 865-883 | 863 |
| 273 | NAGUCAUCAAUGUUAUGGN | 538 | NCCAUAACAUUGAUGACUN | 865-883 | 863 |
| 274 | CAUGAAGCCAGUCAUCAAU | 539 | AUUGAUGACUGGCUUCAUG | 873-891 | 871 |
| 275 | UAUGAAGCCAGUCAUCAAU | 540 | AUUGAUGACUGGCUUCAUA | 873-891 | 871 |
| 276 | AAUGAAGCCAGUCAUCAAU | 541 | AUUGAUGACUGGCUUCAUU | 873-891 | 871 |
| 277 | NAUGAAGCCAGUCAUCAAU | 542 | AUUGAUGACUGGCUUCAUN | 873-891 | 871 |
| 278 | NAUGAAGCCAGUCAUCAAN | 543 | NUUGAUGACUGGCUUCAUN | 873-891 | 871 |
| 279 | AAGUUUAGGUGCUAUCAUU | 544 | AAUGAUAGCACCUAAACUU | 994-1012 | 992 |
| 280 | UAGUUUAGGUGCUAUCAUU | 545 | AAUGAUAGCACCUAAACUA | 994-1012 | 992 |
| 281 | NAGUUUAGGUGCUAUCAUU | 546 | AAUGAUAGCACCUAAACUN | 994-1012 | 992 |
| 282 | NAGUUUAGGUGCUAUCAUN | 547 | NAUGAUAGCACCUAAACUN | 994-1012 | 992 |
| 283 | UGUAGAAGGAAUGUCUGUC | 548 | GACAGACAUUCCUUCUACA | 1023-1041 | 1021 |
| 284 | AGUAGAAGGAAUGUCUGUC | 549 | GACAGACAUUCCUUCUACU | 1023-1041 | 1021 |
| 285 | NGUAGAAGGAAUGUCUGUC | 550 | GACAGACAUUCCUUCUACN | 1023-1041 | 1021 |
| 286 | NGUAGAAGGAAUGUCUGUN | 551 | NACAGACAUUCCUUCUACN | 1023-1041 | 1021 |
| 287 | UACAUGUAGAAGGAAUGUC | 552 | GACAUUCCUUCUACAUGUA | 1027-1045 | 1025 |
| 288 | AACAUGUAGAAGGAAUGUC | 553 | GACAUUCCUUCUACAUGUU | 1027-1045 | 1025 |
| 289 | NACAUGUAGAAGGAAUGUC | 554 | GACAUUCCUUCUACAUGUN | 1027-1045 | 1025 |
| 290 | NACAUGUAGAAGGAAUGUN | 555 | NACAUUCCUUCUACAUGUN | 1027-1045 | 1025 |
| 291 | CAAGAAGUGUCAUUACAUG | 556 | CAUGUAAUGACACUUCUUG | 1040-1058 | 1038 |
| 292 | UAAGAAGUGUCAUUACAUG | 557 | CAUGUAAUGACACUUCUUA | 1040-1058 | 1038 |
| 293 | AAAGAAGUGUCAUUACAUG | 558 | CAUGUAAUGACACUUCUUU | 1040-1058 | 1038 |
| 294 | NAAGAAGUGUCAUUACAUG | 559 | CAUGUAAUGACACUUCUUN | 1040-1058 | 1038 |
| 295 | NAAGAAGUGUCAUUACAUN | 560 | NAUGUAAUGACACUUCUUN | 1040-1058 | 1038 |
| 296 | ACAAGAAGUGUCAUUACAU | 561 | AUGUAAUGACACUUCUUGU | 1041-1059 | 1039 |
| 297 | UCAAGAAGUGUCAUUACAU | 562 | AUGUAAUGACACUUCUUGA | 1041-1059 | 1039 |
| 298 | NCAAGAAGUGUCAUUACAU | 563 | AUGUAAUGACACUUCUUGN | 1041-1059 | 1039 |
| 299 | NCAAGAAGUGUCAUUACAN | 564 | NUGUAAUGACACUUCUUGN | 1041-1059 | 1039 |
| 300 | CACAAGAAGUGUCAUUACA | 565 | UGUAAUGACACUUCUUGUG | 1042-1060 | 1040 |
| 301 | UACAAGAAGUGUCAUUACA | 566 | UGUAAUGACACUUCUUGUA | 1042-1060 | 1040 |
| 302 | AACAAGAAGUGUCAUUACA | 567 | UGUAAUGACACUUCUUGUU | 1042-1060 | 1040 |
| 303 | NACAAGAAGUGUCAUUACA | 568 | UGUAAUGACACUUCUUGUN | 1042-1060 | 1040 |
| 304 | NACAAGAAGUGUCAUUACN | 569 | NGUAAUGACACUUCUUGUN | 1042-1060 | 1040 |
| 305 | UUUCACAAUACUUUGCUUG | 570 | CAAGCAAAGUAUUGUGAAA | 1151-1169 | 1149 |
| 306 | AUUCACAAUACUUUGCUUG | 571 | CAAGCAAAGUAUUGUGAAU | 1151-1169 | 1149 |
| 307 | NUUCACAAUACUUUGCUUG | 572 | CAAGCAAAGUAUUGUGAAN | 1151-1169 | 1149 |
| 308 | NUUCACAAUACUUUGCUUN | 573 | NAAGCAAAGUAUUGUGAAN | 1151-1169 | 1149 |
| 309 | CUUCUCAGGAUCUACUUGU | 574 | ACAAGUAGAUCCUGAGAAG | 1220-1238 | 1218 |
| 310 | UUUCUCAGGAUCUACUUGU | 575 | ACAAGUAGAUCCUGAGAAG | 1220-1238 | 1218 |
| 311 | AUUCUCAGGAUCUACUUGU | 576 | ACAAGUAGAUCCUGAGAAU | 1220-1238 | 1218 |
| 312 | NUUCUCAGGAUCUACUUGU | 577 | ACAAGUAGAUCCUGAGAAN | 1220-1238 | 1218 |
| 313 | NUUCUCAGGAUCUACUUGN | 578 | NCAAGUAGAUCCUGAGAAN | 1220-1238 | 1218 |
| 314 | AGUAGCUGUAACAAAGGUA | 579 | UACCUUUGUUACAGCUACU | 1239-1257 | 1237 |
| 315 | UGUAGCUGUAACAAAGGUA | 580 | UACCUUUGUUACAGCUACA | 1239-1257 | 1237 |
| 316 | NGUAGCUGUAACAAAGGUA | 581 | UACCUUUGUUACAGCUACN | 1239-1257 | 1237 |
| 317 | NGUAGCUGUAACAAAGGUN | 582 | NACCUUUGUUACAGCUACN | 1239-1257 | 1237 |
| 318 | AUAGUGUCAAUUACAAAGG | 583 | CCUUUGUAAUUGACACUAU | 1328-1346 | 1326 |
| 319 | UUAGUGUCAAUUACAAAGG | 584 | CCUUUGUAAUUGACACUAA | 1328-1346 | 1326 |
| 320 | NUAGUGUCAAUUACAAAGG | 585 | CCUUUGUAAUUGACACUAN | 1328-1346 | 1326 |
| 321 | NUAGUGUCAAUUACAAAGN | 586 | NCUUUGUAAUUGACACUAN | 1328-1346 | 1326 |

N = any nucleobase
I = inosine (hypoxanthine nucleobase) nucleotide
(A^{2N}) = 2-aminoadenosine nucleotide

[0100] The TSLP RNAi agent sense strands and antisense strands that comprise or consist of the nucleotide sequences in Table 2 can be modified nucleotides or unmodified nucleotides. In some embodiments, the TSLP RNAi agents having the sense and antisense strand sequences that comprise or consist of any of the nucleotide sequences in Table 2 are all or substantially all modified nucleotides.

[0101] In some embodiments, the antisense strand of a TSLP RNAi agent disclosed herein differs by 0, 1, 2, or 3 nucleotides from any of the antisense strand sequences in Table 2. In some embodiments, the sense strand of a TSLP RNAi agent disclosed herein differs by 0, 1, 2, or 3 nucleotides from any of the sense strand sequences in Table 2.

[0102] As used herein, each N listed in a sequence disclosed in Table 2 may be independently selected from any and all nucleobases (including those found on both modified and unmodified nucleotides). In some embodiments, an N nucleotide listed in a sequence disclosed in Table 2 has a nucleobase that is complementary to the N nucleotide at the corresponding position on the other strand. In some embodiments, an N nucleotide listed in a sequence disclosed in Table 2 has a nucleobase that is not complementary to the N nucleotide at the corresponding position on the other strand. In some embodiments, an N nucleotide listed in a sequence disclosed in Table 2 has a nucleobase that is the same as the N nucleotide at the corresponding position on the other strand. In some embodiments, an N nucleotide listed in a sequence disclosed in Table 2 has a nucleobase that is different from the N nucleotide at the corresponding position on the other strand.

[0103] Certain modified TSLP RNAi agent sense and antisense strands are provided in Table 3, Table 4, Table 5, Table 6, and Table 10. Certain modified TSLP RNAi agent antisense strands, as well as their underlying unmodified nucleobase sequences, are provided in Table 3. Certain modified TSLP RNAi agent sense strands, as well as their underlying unmodified nucleobase sequences, are provided in Tables 4, 5, and 6. In forming TSLP RNAi agents, each of the nucleotides in each of the underlying base sequences listed in Tables 3, 4, 5, and 6, as well as in Table 2, above, can be a modified nucleotide.

[0104] The TSLP RNAi agents described herein are formed by annealing an antisense strand with a sense strand. A sense strand containing a sequence listed in Table 2, Table 4, Table 5, or Table 6 can be hybridized to any antisense strand containing a sequence listed in Table 2 or Table 3, provided the two sequences have a region of at least 85% complementarity over a contiguous 16, 17, 18, 19, 20, or 21 nucleotide sequence.

[0105] In some embodiments, a TSLP RNAi agent antisense strand comprises a nucleotide sequence ofany of the sequences in Table 2 or Table 3.

[0106] In some embodiments, a TSLP RNAi agent comprises or consists of a duplex having the nucleobase sequences of the sense strand and the antisense strand of any of the sequences in Table 2, Table 3, Table 4, Table 5, Table 6, or Table 10.

[0107] Examples of antisense strands containing modified nucleotides are provided in Table 3. Examples of sense strands containing modified nucleotides are provided in Tables 4, 5 and 6.

[0108] As used in Tables 3, 4, 5, 6, and 10. the following notations are used to indicate modified nucleotides, targeting groups, and linking groups:

| | |
|---|---|
| A= | adenosine-3′-phosphate |
| C= | cytidine-3′-phosphate |
| G= | guanosine-3′-phosphate |
| U= | uridine-3′-phosphate |
| I= | inosine-3′-phosphate |
| a= | 2′-O-methyladenosine-3′-phosphate |
| as= | 2′-O-methyladenosine-3′-phosphorothioate |
| c= | 2′-O-methylcytidine-3′-phosphate |
| cs= | 2′-O-methylcytidine-3′-phosphorothioate |
| g= | 2′-O-methylguanosine-3′-phosphate |
| gs= | 2′-O-methylguanosine-3′-phosphorothioate |
| i= | 2′-O-methylinosine-3′-phosphate |
| is= | 2′-O-methylinosine-3′-phosphorothioate |
| t= | 2′-O-methyl-5-methyluridine-3′-phosphate |
| ts= | 2′-O-methyl-5-methyluridine-3′-phosphorothioate |
| u= | 2′-O-methyluridine-3′-phosphate |
| us= | 2′-O-methyluridine-3′-phosphorothioate |
| Af= | 2′-fluoroadenosine-3′-phosphate |
| Afs= | 2′-fluoroadenosine-3′-phosporothioate |
| Cf= | 2′-fluorocytidine-3′-phosphate |
| Cfs= | 2′-fluorocytidine-3′-phosphorothioate |
| Gf= | 2′-fluoroguanosine-3′-phosphate |
| Gfs= | 2′-fluoroguanosine-3′-phosphorothioate |
| Tf= | 2′-fluoro-5′-methyluridine-3′-phosphate |
| Tfs= | 2′-fluoro-5′-methyluridine-3′-phosphorothioate |
| Uf= | 2′-fluorouridine-3′-phosphate |
| Ufs= | 2′-fluorouridine-3′-phosphorothioate |
| dT= | 2′-deoxythymidine-3′-phosphate |
| dTs= | 2′-deoxythymidine-3′-phosphorothioate |
| dA= | 2′-deoxyadenosine-3′-phosphate |
| dAs= | 2′-deoxyadenosine-3′-phosphorothioate |
| dC= | 2′-deoxycytidine-3′-phosphate |
| dCs= | 2′-deoxycytidine-3′-phosphorothioate |
| dG= | 2′-deoxyguanosine-3′-phosphate |
| dGs= | 2′-deoxyguanosine-3′-phosphorothioate |
| A_{UNA}= | 2′,3′-seco-adenosine-3′-phosphate |
| A_{UNA}s= | 2′,3′-seco-adenosine-3′-phosphorothioate |
| C_{UNA}= | 2′,3′-seco-cytidine-3′-phosphate |
| C_{UNA}s= | 2′,3′-seco-cytidine-3′-phosphorothioate |
| G_{UNA}= | 2′,3′-seco-guanosine-3′-phosphate |
| G_{UNA}s= | 2′,3′-seco-guanosine-3′-phosphorothioate |
| U_{UNA}= | 2′,3′-seco-uridine-3′-phosphate |
| U_{UNA}s= | 2′,3′-seco-uridine-3′-phosphorothioate |
| a_2N= | 2′-O-methyl-2-aminoadenosine-3′-phosphate, |
| | see Table 11 |
| a_2Ns= | 2′-O-methyl-2-aminoadenosine-3′-phosphorothioate, |
| | see Table 11 |
| (invAb)= | inverted abasic deoxyribonucleotide-5′-phosphate, |
| | see Table 11 |
| (invAb)s= | inverted abasic deoxyribonucleotide-5′-phosphorothioate, |
| | see Table 11 |
| s= | phosphorothioate linkage |
| ss= | phosphrodithioate linkage |
| p= | terminal phosphate (as synthesized) |
| vpdN= | vinyl phosphonate deoxyribonucleotide |
| cPrpa= | 5′-cyclopropyl phosphonate-2′-O-methyladenosine-3′- |
| | phosphate (see Table 11) |
| cPrpas= | 5′-cyclopropyl phosphonate-2′-O-methyladenosine-3′- |
| | phosphorothioate (see Table 11) |
| cPrpu= | 5′-cyclopropyl phosphonate-2′-O-methyluridine-3′- |
| | phosphate (see Table 11) |
| cPrpus= | 5′-cyclopropyl phosphonate-2′-O-methyluridine-3′- |
| | phosphorothioate (see Table 11) |
| cPrpi= | 5′-cyclopropyl phosphonate-2′-O-methylinosine-3′- |
| | phosphate (see Table 11) |
| cPrpis= | 5′-cyclopropyl phosphonate-2′-O-methylinosine-3′- |
| | phosphorothioate (see Table 11) |
| (C6-SS-C6)= | see Table 11 |
| (6-SS-6)= | see Table 11 |
| (NH2-C6)= | see Table 11 |
| (NH2-C6)s= | see Table 11 |
| (TriAlk14)= | see Table 11 |
| (TriAlk14)s= | see Table 11 |
| -C6-= | see Table 11 |
| -C6s-= | see Table 11 |
| -L6-C6-= | see Table 11 |
| -L6-C6s-= | see Table 11 |
| (TA14)= | see Table 11 (structure of (TriAlk14)s after conjugation) |
| (TA14)s | see Table 11 (structure of (TriAlk14)s after conjugation) |
| TGNA | thymine glycol nucleic acid, see Table 11 |

[0109] As the person of ordinary skill in the art would readily understand, unless otherwise indicated by the sequence (such as, for example, by a phosphorothioate linkage “s”), when present in an oligonucleotide, the nucleotide monomers are mutually linked by 5′-3′-phosphodiester bonds. As the person of ordinary skill in the art would clearly understand, the inclusion of a phosphorothioate linkage as shown in the modified nucleotide sequences disclosed herein replaces the phosphodiester linkage typically present in oligonucleotides. Further, the person of ordinary skill in the art would readily understand that the terminal nucleotide at the 3′ end of a given oligonucleotide sequence would typically have a hydroxyl (—OH) group at the respective 3′ position of the given monomer instead of a phosphate moiety ex vivo. Additionally, for the embodiments disclosed herein, when viewing the respective strand 5′→3′, the inverted abasic residues are inserted such that the 3′ position of the deoxyribose is linked at the 3′ end of the preceding monomer on the respective strand (see, e.g., Table 11). Moreover, as the person of ordinary skill would readily understand and appreciate, while the phosphorothioate chemical structures depicted herein typically show the anion on the sulfur atom, the inventions disclosed herein encompass all phosphorothioate tautomers (e.g., where the sulfur atom has a double-bond and the anion is on an oxygen atom). Unless expressly indicated otherwise herein, such understandings of the person of ordinary skill in the art are used when describing the TSLP RNAi agents and compositions of TSLP RNAi agents disclosed herein.

[0110] Certain examples of targeting groups and linking groups used with the TSLP RNAi agents disclosed herein are included in the chemical structures provided below in Table 11. Each sense strand and/or antisense strand can have any targeting groups or linking groups listed herein, as well as other targeting or linking groups, conjugated to the 5′ and/or 3′ end of the sequence.

TABLE 3
TSLP RNAi Agent Antisense Strand Sequences

| | | | Underlying Base | |
|---|---|---|---|---|
| | | | Sequence (5′→3′) | |
| AS | | SEQ ID | (Shown as an Unmodified | SEQ ID |
| Strand ID | Modified Antisense Strand (5′→3′) | NO. | Nucleotide Sequence) | NO. |
| AM14179-AS | cPrpasGfsasAfuUfuGfuGfaGfgUfuUfgAfuUfsc | 587 | AGAAUUUGUGAGGUUUGAUUC | 823 |
| AM16334-AS | cPrpusAfscsCfaUfuucucUfcAfgUfuUfcasg | 588 | UACCAUUUCUCUCAGUUUCAG | 824 |
| AM18285-AS | usUfsasGfcAfuUfuAfuCfuGfaGfuUfuCfsc | 589 | UUAGCAUUUAUCUGAGUUUCC | 825 |
| AM18311-AS | usAfscsAfuUfuAfuUfgGfuUfgUfgAfcUfsu | 590 | UACAUUUAUUGGUUGUGACUU | 826 |
| AM19258-AS | cPrpusUfsgsGfaUfuUfcAfgUfaAfgGfcAfaUfsg | 591 | UUGGAUUUCAGUAAGGCAAUG | 827 |
| AM19260-AS | cPrpusAfsasGfgUfuAfgGfcUfcUfgGfaUfuUfsc | 592 | UAAGGUUAGGCUCUGGAUUUC | 828 |
| AM19262-AS | cPrpasUfsusUfaUfcUfgAfgUfuUfcCfgAfaUfsc | 593 | AUUUAUCUGAGUUUCCGAAUC | 829 |
| AM19264-AS | cPrpusAfscsAfuUfuAfuUfgGfuUfgUfgAfcUfsu | 594 | UACAUUUAUUGGUUGUGACUU | 826 |
| AM19266-AS | cPrpasGfsasCfaUfuUfaUfuGfgUfuGfuGfaCfsu | 595 | AGACAUUUAUUGGUUGUGACU | 830 |
| AM19268-AS | cPrpusAfsusUfuAfuUfgGfuUfgUfgAfcUfuUfsc | 596 | UAUUUAUUGGUUGUGACUUUC | 831 |
| AM19335-AS | cPrpusUfsasGfcAfuUfuAfuCfuGfaGfuUfuCfsc | 597 | UUAGCAUUUAUCUGAGUUUCC | 825 |
| AM19337-AS | cPrpasUfsusGfaAfgGfuUfaGfgCfuCfuGfgAfsu | 598 | AUUGAAGGUUAGGCUCUGGAU | 832 |
| AM19339-AS | cPrpusUfsusAfgGfcUfcUfgGfaUfuUfcAfgUfsa | 599 | UUUAGGCUCUGGAUUUCAGUA | 833 |
| AM19685-AS | cPrpusUfsaGfcAfuUfuAfuCfuGfaGfuUfuCfsc | 600 | UUAGCAUUUAUCUGAGUUUCC | 825 |
| AM19938-AS | cPrpuUfaGfcAfuUfuAfuCfuGfaGfuUfuCfsc | 601 | UUAGCAUUUAUCUGAGUUUCC | 825 |
| AM19939-AS | cPrpusUfsagcauuuauCfuGfaGfuuucsc | 602 | UUAGCAUUUAUCUGAGUUUCC | 825 |
| AM19941-AS | cPrpusUfsagcauuUfauCfuGfaGfuuucsc | 603 | UUAGCAUUUAUCUGAGUUUCC | 825 |
| AM19942-AS | cPrpusUfsagCfauuuauCfuGfaGfuuucsc | 604 | UUAGCAUUUAUCUGAGUUUCC | 825 |
| AM19943-AS | cPrpusUfsagcaUfuuauCfuGfaGfuuucsc | 605 | UUAGCAUUUAUCUGAGUUUCC | 825 |
| AM19944-AS | cPrpusUfsagcauUfuauCfuGfaGfuuucsc | 606 | UUAGCAUUUAUCUGAGUUUCC | 825 |
| AM19945-AS | cPrpusUfsaGfcAfUfuuauCfuGfaGfuuucsc | 607 | UUAGCAUUUAUCUGAGUUUCC | 825 |
| AM19946-AS | cPrpusdTsagcauuuauCfuGfaGfuuucsc | 608 | UTAGCAUUUAUCUGAGUUUCC | 897 |
| AM19947-AS | cPrpasGfsaCfaUfuUfaUfuGfgUfuGfuGfaCfsu | 609 | AGACAUUUAUUGGUUGUGACU | 830 |
| AM19949-AS | cPrpasGfsacauuuauuGfgUfuGfugacsu | 610 | AGACAUUUAUUGGUUGUGACU | 830 |
| AM19950-AS | cPrpasGfsacauuuaUfuGfgUfuGfugacsu | 611 | AGACAUUUAUUGGUUGUGACU | 830 |
| AM19951-AS | cPrpasGfsacauuuAfuuGfgUfuGfugacsu | 612 | AGACAUUUAUUGGUUGUGACU | 830 |
| AM19952-AS | cPrpasGfsacauUfuauuGfgUfuGfugacsu | 613 | AGACAUUUAUUGGUUGUGACU | 830 |
| AM19953-AS | cPrpasGfsacAfUfuuAfuuGfgUfuGfugacsu | 614 | AGACAUUUAUUGGUUGUGACU | 830 |
| AM19954-AS | cPrpasGfsaCfaUfUfuauuGfgUfuGfugacsu | 615 | AGACAUUUAUUGGUUGUGACU | 830 |
| AM19955-AS | cPrpaGfacauuuaUfuGfgUfuGfugacsu | 616 | AGACAUUUAUUGGUUGUGACU | 830 |
| AM20176-AS | cPrpusGfsgsGfaUfuGfaAfgGfuUfaGfgCfuCfsu | 617 | UGGGAUUGAAGGUUAGGCUCU | 834 |
| AM20299-AS | cPrpusUfsagdCauuuauCfuGfaguuucsc | 618 | UUAGCAUUUAUCUGAGUUUCC | 825 |
| AM20300-AS | cPrpusUfsagcauudTauCfuGfaguuucsc | 619 | UUAGCAUUTAUCUGAGUUUCC | 898 |
| AM20301-AS | cPrpusdTsagcauudTauCfudGaguuucsc | 620 | UTAGCAUUTAUCUGAGUUUCC | 899 |
| AM20302-AS | cPrpusdTsagcauudTauCfudGadGuuucsc | 621 | UTAGCAUUTAUCUGAGUUUCC | 899 |
| AM20303-AS | cPrpusUfsagcauuuauCfuGfaguuucsc | 622 | UUAGCAUUUAUCUGAGUUUCC | 825 |
| AM20304-AS | cPrpusUfsagcaTGNAuUfauCfuGfaGfuuucsc | 623 | UUAGCATUUAUCUGAGUUUCC | 900 |
| AM20305-AS | cPrpusUfsagcaU_{UNA}uUfauCfuGfaGfuuucsc | 624 | UUAGCAUUUAUCUGAGUUUCC | 825 |
| AM20307-AS | cPrpusUfsagcauUfuauCfuGfaGfuusc | 625 | UUAGCAUUUAUCUGAGUUC | 835 |
| AM20308-AS | cPrpusUfsagcauUfUfauCfuGfaguuucsc | 626 | UUAGCAUUUAUCUGAGUUUCC | 825 |
| AM20309-AS | cPrpusUfsagcauuUfauCfuGfaguuucsc | 627 | UUAGCAUUUAUCUGAGUUUCC | 825 |
| AM20310-AS | cPrpusUfsagCfauuUfauCfuGfaguuucsc | 628 | UUAGCAUUUAUCUGAGUUUCC | 825 |
| AM20314-AS | cPrpusdTsagcauudTauCfuGfaguuucsc | 629 | UTAGCAUUTAUCUGAGUUUCC | 899 |
| AM20315-AS | cPrpusdTsagcauudTauCfuGfadGuuucsc | 630 | UTAGCAUUTAUCUGAGUUUCC | 899 |
| AM20487-AS | cPrpusAfscAfuUfuAfuUfgGfuUfgUfgAfcUfsu | 631 | UACAUUUAUUGGUUGUGACUU | 826 |
| AM20488-AS | cPrpasGfsacAfUfuuauuGfgUfuGfugacsu | 632 | AGACAUUUAUUGGUUGUGACU | 830 |
| AM20489-AS | cPrpasGfsacAfUfuuauuGfgUfugugacsu | 633 | AGACAUUUAUUGGUUGUGACU | 830 |
| AM20490-AS | cPrpasGfsacAfuuuauuGfgUfuGfugacsu | 634 | AGACAUUUAUUGGUUGUGACU | 830 |
| AM20491-AS | cPrpusUfsagCfAfuuUfauCfuGfaGfuuucsc | 635 | UUAGCAUUUAUCUGAGUUUCC | 825 |
| AM20534-AS | cPrpasGfsaCfaUfuUfaUfuGfgUfuGfuGfaCfsc | 636 | AGACAUUUAUUGGUUGUGACC | 836 |
| AM20536-AS | cPrpusGfsaCfaUfuUfaUfuGfgUfuGfuGfaCfsc | 637 | UGACAUUUAUUGGUUGUGACC | 837 |
| AM20538-AS | cPrpusGfsaCfaUfuUfaUfuGfgUfuGfuGfaCfsu | 638 | UGACAUUUAUUGGUUGUGACU | 838 |
| AM20539-AS | cPrpusGfsacauuuaUfuGfgUfuGfugacsu | 639 | UGACAUUUAUUGGUUGUGACU | 838 |
| AM20540-AS | cPrpusGfsacauUfuauuGfgUfuGfugacsu | 640 | UGACAUUUAUUGGUUGUGACU | 838 |
| CA004207 | cPrpasGfsacauuuaUfuGfgUfuGfugacsu | 641 | AGACAUUUAUUGGUUGUGACU | 830 |
| CA004288 | cPrpusUfsagCfauuUfauCfuGfaguuucsc | 642 | UUAGCAUUUAUCUGAGUUUCC | 825 |
| CA004416 | cPrpusAfscauuuauUfgGfuUfgUfgacusu | 643 | UACAUUUAUUGGUUGUGACUU | 826 |
| CA004417 | cPrpusAfscaUfUfuaUfugGfuUfgUfgacusu | 644 | UACAUUUAUUGGUUGUGACUU | 826 |
| CA004418 | cPrpusAfscauuUfauugGfuUfgUfgacusu | 645 | UACAUUUAUUGGUUGUGACUU | 826 |
| CA004450 | cPrpusGfsacauUfuauuGfgUfuGfugacsc | 646 | UGACAUUUAUUGGUUGUGACC | 837 |
| CA004451 | cPrpasGfsacauUfuauuGfgUfuGfugacsc | 647 | AGACAUUUAUUGGUUGUGACC | 836 |
| CA004452 | cPrpusGfsacauuuaUfuGfgUfuGfugacsc | 648 | UGACAUUUAUUGGUUGUGACC | 837 |
| CA004453 | cPrpasGfsacauuuaUfuGfgUfuGfugacsc | 649 | AGACAUUUAUUGGUUGUGACC | 836 |
| CA004518 | cPrpuGfacauuuaUfuGfgUfuGfugacsu | 650 | UGACAUUUAUUGGUUGUGACU | 838 |
| CA004519 | cPrpuGfacauuuaUfuGfgUfuGfugacsc | 651 | UGACAUUUAUUGGUUGUGACC | 837 |
| CA004538 | asGfsacauuuaUfuGfgUfuGfugacsu | 652 | AGACAUUUAUUGGUUGUGACU | 830 |
| CA004830 | asGfsacauuuaUfuGfgUfuGfugacsc | 653 | AGACAUUUAUUGGUUGUGACC | 836 |
| CA004833 | asGfsacauuuAfuuGfgUfuGfugacsc | 654 | AGACAUUUAUUGGUUGUGACC | 836 |
| CA004834 | cPrpasGfsacauuuAfuuGfgUfuGfugacsc | 655 | AGACAUUUAUUGGUUGUGACC | 836 |
| CA005032 | cPrpasGfsacauU_{UNA}uaUfuGfgUfuGfugacsu | 656 | AGACAUUUAUUGGUUGUGACU | 830 |
| CA005033 | cPrpasGfsacauU_{UNA}uaUfuGfgUfuGfugacsc | 657 | AGACAUUUAUUGGUUGUGACC | 836 |
| CA005034 | cPrpasGfsacauTGNAuaUfuGfgUfuGfugacsc | 658 | AGACAUTUAUUGGUUGUGACC | 901 |
| CA005035 | cPrpusAfscauuU_{UNA}auUfgGfuUfgUfgacusu | 659 | UACAUUUAUUGGUUGUGACUU | 826 |
| CA005037 | cPrpusAfscauuU_{UNA}auUfgGfuUfgUfgacusc | 660 | UACAUUUAUUGGUUGUGACUC | 839 |
| CA005056 | isGfsacauuuaUfuGfgUfuGfugacsu | 661 | IGACAUUUAUUGGUUGUGACU | 840 |
| CA005404 | cPrpisGfsacauuuaUfuGfgUfuGfugacsu | 662 | IGACAUUUAUUGGUUGUGACU | 840 |
| CA005407 | cPrpasGfsacguuuaUfuGfgUfuGfugacsu | 663 | AGACGUUUAUUGGUUGUGACU | 841 |
| CA005410 | cPrpasGfsacauuuaUfuGfgUfuGfugacssu | 664 | AGACAUUUAUUGGUUGUGACU | 830 |
| CA005411 | cPrpaGfacauuuaUfuGfgUfuGfugascsu | 665 | AGACAUUUAUUGGUUGUGACU | 830 |
| CA005412 | cPrpaGfacauuuaUfuGfgUfuGfugacssu | 666 | AGACAUUUAUUGGUUGUGACU | 830 |
| CA005413 | cPrpasGfsacaTGNAuuaUfuGfgUfuGfugacsu | 667 | AGACATUUAUUGGUUGUGACU | 902 |
| CA005414 | cPrpasGfsacauuTGNAaUfuGfgUfuGfugacsu | 668 | AGACAUUTAUUGGUUGUGACU | 903 |
| CA005415 | cPrpasGfsacauuU_{UNA}aUfuGfgUfuGfugacsu | 669 | AGACAUUUAUUGGUUGUGACU | 830 |
| CA005630 | cPrpusCfsaGfaUfagcuaAfgGfcAfgCfcusu | 670 | UCAGAUAGCUAAGGCAGCCUU | 842 |
| CA005632 | cPrpusAfsgUfaAfaggucGfaUfuGfaAfgcsg | 671 | UAGUAAAGGUCGAUUGAAGCG | 843 |
| CA005634 | cPrpusAfscAfgUfuagagUfuAfaUfgUfuusc | 672 | UACAGUUAGAGUUAAUGUUUC | 844 |
| CA005636 | cPrpusAfsaGfuUfaagaaAfcUfcUfuCfugsu | 673 | UAAGUUAAGAAACUCUUCUGU | 845 |
| CA005638 | cPrpusCfsaAfcAfuuugaGfgAfgUfaGfuasc | 674 | UCAACAUUUGAGGAGUAGUAC | 846 |
| CA005640 | cPrpusAfsgUfcAfucaauGfuUfaUfgGfaasg | 675 | UAGUCAUCAAUGUUAUGGAAG | 847 |
| CA005642 | cPrpasAfsgUfuUfaggugCfuAfuCfaUfugsc | 676 | AAGUUUAGGUGCUAUCAUUGC | 848 |
| CA005644 | cPrpusGfsuAfgAfaggaaUfgUfcUfgUfcusu | 677 | UGUAGAAGGAAUGUCUGUCUU | 849 |
| CA005646 | cPrpusAfscAfaGfaagugUfcAfuUfaCfausg | 678 | UACAAGAAGUGUCAUUACAUG | 850 |
| CA005648 | cPrpusUfsuCfuCfaggauCfuAfcUfuGfuasu | 679 | UUUCUCAGGAUCUACUUGUAU | 851 |
| CA005746 | cPrpasGfsacauuugUfuGfgUfuGfugacsc | 680 | AGACAUUUGUUGGUUGUGACC | 852 |
| CA005749 | cPrpasGfsacguuuaUfuGfgUfuGfugacsc | 681 | AGACGUUUAUUGGUUGUGACC | 853 |
| CA005750 | cPrpasGfsacguuuaUfdTGfgUfuGfugacsc | 682 | AGACGUUUAUTGGUUGUGACC | 904 |
| CA005751 | cPrpasGfsacauuuaUfdTGfgUfuGfugacsc | 683 | AGACAUUUAUTGGUUGUGACC | 905 |
| CA005752 | cPrpasGfsacauuuadTuGfgUfuGfugacsc | 684 | AGACAUUUATUGGUUGUGACC | 906 |
| CA005958 | cPrpisGfsacguuuaUfuGfgUfuGfugacsc | 685 | IGACGUUUAUUGGUUGUGACC | 854 |
| CA005959 | cPrpisGfsacauuuaUfuGfgUfuGfugacsc | 686 | IGACAUUUAUUGGUUGUGACC | 855 |
| CA005976 | cPrpisGfsacauuuaUfuGfgUfuGfugacssc | 687 | IGACAUUUAUUGGUUGUGACC | 855 |
| CA005977 | cPrpasGfsacauuuaUfuGfgUfuGfugacssc | 688 | AGACAUUUAUUGGUUGUGACC | 836 |
| CA006068 | cPrpasGfsacguuuaUfuGfgUfuGfugacssc | 689 | AGACGUUUAUUGGUUGUGACC | 853 |
| CA006074 | cPrpisGfsacguuuaUfuGfgUfuGfugacssc | 690 | IGACGUUUAUUGGUUGUGACC | 854 |
| CA006075 | cPrpusGfsacguuuaUfuGfgUfuGfugacssc | 691 | UGACGUUUAUUGGUUGUGACC | 856 |
| CA006076 | cPrpusGfsacauuuaUfuGfgUfuGfugacssc | 692 | UGACAUUUAUUGGUUGUGACC | 837 |
| CA006343 | cPrpasGfsacauuugUfuGfgUfuGfugacssc | 693 | AGACAUUUGUUGGUUGUGACC | 852 |
| CA006345 | cPrpasGfsacauuugUfuGfgUfuGfugacssu | 694 | AGACAUUUGUUGGUUGUGACU | 857 |
| CA006347 | cPrpusGfsacauuugUfuGfgUfuGfugacssc | 695 | UGACAUUUGUUGGUUGUGACC | 858 |
| CA006350 | cPrpasGfsacguuuaUfuGfgUfuGfugacssu | 696 | AGACGUUUAUUGGUUGUGACU | 841 |
| CA006383 | cPrpusGfsacguuuaUfuGfgUfuGfugacsu | 697 | UGACGUUUAUUGGUUGUGACU | 859 |

TABLE 4
TSLP Agent Sense Strand Sequences (Shown Without Linkers, Conjugates, Capping Moieties,
or Terminal dT)

| | | | Underlying Base | |
|---|---|---|---|---|
| | | | Sequence (5′→3′) | |
| | | SEQ ID | (Shown as an Unmodified | SEQ ID |
| Strand ID | Modified Sense Strand (5′→3′) | NO. | Nucleotide Sequence) | NO. |
| AM19257-SS-NL | csa_2NuugccuUfAfCfugaaauccaa | 698 | C(A^{2N})UUGCCUUACUGAAAUCCAA | 860 |
| AM19259-SS-NL | gsa_2NaauccaGfAfGfccuaaccuua | 699 | G(A^{2N})AAUCCAGAGCCUAACCUUA | 861 |
| AM19261-SS-NL | gsauucggaAfAfCfucagauaaa_2Nu | 700 | GAUUCGGAAACUCAGAUAA(A^{2N})U | 862 |
| AM19263-SS-NL | a_2NsagucacaAfCfCfaauaaaugua | 701 | (A^{2N})AGUCACAACCAAUAAAUGUA | 863 |
| AM19265-SS-NL | asgucacaaCfCfAfauaaaugucu | 702 | AGUCACAACCAAUAAAUGUCU | 864 |
| AM19267-SS-NL | gsaaagucaCfAfAfccaauaaa_2Nua | 703 | GAAAGUCACAACCAAUAA(A^{2N})UA | 865 |
| AM19334-SS-NL | gsgaaacucAfGfAfuaaaugcuaa | 704 | GGAAACUCAGAUAAAUGCUAA | 866 |
| AM19336-SS-NL | asuccagagCfCfUfaaccuucaau | 705 | AUCCAGAGCCUAACCUUCAAU | 867 |
| AM19338-SS-NL | usa_2NcugaaaUfCfCfagagccuaaa | 706 | U(A^{2N})CUGAAAUCCAGAGCCUAAA | 868 |
| AM19940-SS-NL | gsgaaacucAfgAfuAfaaugcuaa | 707 | GGAAACUCAGAUAAAUGCUAA | 866 |
| AM19948-SS-NL | asgucacaaCfcAfaUfaaaugucu | 708 | AGUCACAACCAAUAAAUGUCU | 864 |
| AM20175-SS-NL | asgagccuaAfCfCfuucaaucuca | 709 | AGAGCCUAACCUUCAAUCUCA | 869 |
| AM20177-SS-NL | asgagccuaAfCfCfuucaauccca | 710 | AGAGCCUAACCUUCAAUCCCA | 870 |
| AM20298-SS-NL | gsgaaacucdAgdAudAaaugcuaa | 711 | GGAAACUCAGAUAAAUGCUAA | 866 |
| AM20306-SS-NL | gsa_2NacucAfGfAfuaaaugcuaa | 712 | G(A^{2N})ACUCAGAUAAAUGCUAA | 871 |
| AM20492-SS-NL | asgucacAfaCfcAfauaaaugucu | 713 | AGUCACAACCAAUAAAUGUCU | 864 |
| AM20533-SS-NL | gsgucacaaCfCfAfauaaaugucu | 714 | GGUCACAACCAAUAAAUGUCU | 872 |
| AM20535-SS-NL | gsgucacaaCfCfAfauaaauguca | 715 | GGUCACAACCAAUAAAUGUCA | 873 |
| AM20537-SS-NL | asgucacaaCfCfAfauaaauguca | 716 | AGUCACAACCAAUAAAUGUCA | 874 |
| CS004419-NL | a_2NsagucacaAfcCfaAfuaaaugua | 717 | (A^{2N})AGUCACAACCAAUAAAUGUA | 863 |
| CS004829-NL | ggucacaaCfCfAfauaaaugucu | 718 | GGUCACAACCAAUAAAUGUCU | 872 |
| CS005406-NL | asgucacaaCfCfAfauaaaugucc | 719 | AGUCACAACCAAUAAAUGUCC | 875 |
| CS005629-NL | asaggcugcCfUfUfagcuaucuga | 720 | AAGGCUGCCUUAGCUAUCUGA | 876 |
| CS005631-NL | csgcuucaaUfCfGfaccuuuacua | 721 | CGCUUCAAUCGACCUUUACUA | 877 |
| CS005633-NL | gsa_2NaacauuAfAfCfucuaacugua | 722 | G(A^{2N})AACAUUAACUCUAACUGUA | 878 |
| CS005635-NL | a_2NscagaagaGfUfUfucuuaacuua | 723 | (A^{2N})CAGAAGAGUUUCUUAACUUA | 879 |
| CS005637-NL | gsuacuacuCfCfUfcaaauguuga | 724 | GUACUACUCCUCAAAUGUUGA | 880 |
| CS005639-NL | csuuccauaAfCfAfuugaugacua | 725 | CUUCCAUAACAUUGAUGACUA | 881 |
| CS005641-NL | gscaaugauAfGfCfaccuaaacuu | 726 | GCAAUGAUAGCACCUAAACUU | 882 |
| CS005643-NL | a_2NsagacagaCfAfUfuccuucuaca | 727 | (A^{2N})AGACAGACAUUCCUUCUACA | 883 |
| CS005645-NL | csa_2NuguaauGfAfCfacuucuugua | 728 | C(A^{2N})UGUAAUGACACUUCUUGUA | 884 |
| CS005647-NL | a_2NsuacaaguAfGfAfuccugagaaa | 729 | (A^{2N})UACAAGUAGAUCCUGAGAAA | 885 |
| CS007200-NL | asgucacaaCfCfAfauaaaugucu | 730 | AGUCACAACCAAUAAAUGUCU | 864 |
| CS008694-NL | asgucacaaCfCfAfauaaaugucu | 731 | AGUCACAACCAAUAAAUGUCU | 864 |
| CS914177-NL | ggaaacucAfGfAfuaaaugcuaa | 732 | GGAAACUCAGAUAAAUGCUAA | 866 |
| CS914203-NL | agucacaaCfCfAfauaaaugucu | 733 | AGUCACAACCAAUAAAUGUCU | 864 |
| CS915060-NL | a_2NsagucacaAfCfCfaauaaaugua | 734 | (A^{2N})AGUCACAACCAAUAAAUGUA | 863 |
| CS915061-NL | asgucacaaCfCfAfauaaaugucu | 735 | AGUCACAACCAAUAAAUGUCU | 864 |
| CS915705-NL | gsgaaacucAfgAfuAfaaugcuaa | 736 | GGAAACUCAGAUAAAUGCUAA | 866 |
| CS916246-NL | gsgucacaaCfCfAfauaaaugucu | 737 | GGUCACAACCAAUAAAUGUCU | 872 |
| CS916247-NL | gsgucacaaCfCfAfauaaauguca | 738 | GGUCACAACCAAUAAAUGUCA | 873 |
| CS916248-NL | asgucacaaCfCfAfauaaauguca | 739 | AGUCACAACCAAUAAAUGUCA | 874 |

(A^{2N}) = 2-aminoadenosine nucleotide; I = hypoxanthine (inosine) nucleotide

TABLE 5
TSLP RNAi Agent Sense Strand Sequences (Shown With (TriAlk14) Linker or (NAG37)s (see Table 11 for structure information.))

| | | | Underlying Base Sequence (5′→3′) | |
|---|---|---|---|---|
| | | SEQ ID | (Shown as an Unmodified Nucleotide | SEQ ID |
| Strand ID | Modified Sense Strand (5′→3′) | NO. | Sequence) | NO. |
| AM19257-SS | (TriAlk14)csa_2NuugccuUfAfCfugaaauccaas(invAb) | 740 | C(A^{2N})UUGCCUUACUGAAAUCCAA | 860 |
| AM19259-SS | (TriAlk14)gsa_2NaauccaGfAfGfccuaaccuuas(invAb) | 741 | G(A^{2N})AAUCCAGAGCCUAACCUUA | 861 |
| AM19261-SS | (TriAlk14)gsauucggaAfAfCfucagauaaa_2Nus(invAb) | 742 | GAUUCGGAAACUCAGAUAA(A^{2N})U | 862 |
| AM19263-SS | (TriAlk14)a_2NsagucacaAfCfCfaauaaauguas(invAb) | 743 | (A^{2N})AGUCACAACCAAUAAAUGUA | 863 |
| AM19265-SS | (TriAlk14)asgucacaaCfCfAfauaaaugucus(invAb) | 744 | AGUCACAACCAAUAAAUGUCU | 864 |
| AM19267-SS | (TriAlk14)gsaaagucaCfAfAfccaauaaa_2Nuas(invAb) | 745 | GAAAGUCACAACCAAUAA(A^{2N})UA | 865 |
| AM19334-SS | (TriAlk14)gsgaaacucAfGfAfuaaaugcuaas(invAb) | 746 | GGAAACUCAGAUAAAUGCUAA | 866 |
| AM19336-SS | (TriAlk14)asuccagagCfCfUfaaccuucaaus(invAb) | 747 | AUCCAGAGCCUAACCUUCAAU | 867 |
| AM19338-SS | (TriAlk14)usa_2NcugaaaUfCfCfagagccuaaas(invAb) | 748 | U(A^{2N})CUGAAAUCCAGAGCCUAAA | 868 |
| AM19940-SS | (TriAlk14)gsgaaacucAfgAfuAfaaugcuaas(invAb) | 749 | GGAAACUCAGAUAAAUGCUAA | 866 |
| AM19948-SS | (TriAlk14)asgucacaaCfcAfaUfaaaugucus(invAb) | 750 | AGUCACAACCAAUAAAUGUCU | 864 |
| AM20175-SS | (TriAlk14)asgagccuaAfCfCfuucaaucucas(invAb) | 751 | AGAGCCUAACCUUCAAUCUCA | 869 |
| AM20177-SS | (TriAlk14)asgagccuaAfCfCfuucaaucccas(invAb) | 752 | AGAGCCUAACCUUCAAUCCCA | 870 |
| AM20298-SS | (TriAlk14)gsgaaacucdAgdAudAaaugcuaas(invAb) | 753 | GGAAACUCAGAUAAAUGCUAA | 866 |
| AM20306-SS | (TriAlk14)gsa_2NacucAfGfAfuaaaugcuaas(invAb) | 754 | G(A^{2N})ACUCAGAUAAAUGCUAA | 871 |
| AM20492-SS | (TriAlk14)asgucacAfaCfcAfauaaaugucus(invAb) | 755 | AGUCACAACCAAUAAAUGUCU | 864 |
| AM20533-SS | (TriAlk14)gsgucacaaCfCfAfauaaaugucus(invAb) | 756 | GGUCACAACCAAUAAAUGUCU | 872 |
| AM20535-SS | (TriAlk14)gsgucacaaCfCfAfauaaaugucas(invAb) | 757 | GGUCACAACCAAUAAAUGUCA | 873 |
| AM20537-SS | (TriAlk14)asgucacaaCfCfAfauaaaugucas(invAb) | 758 | AGUCACAACCAAUAAAUGUCA | 874 |
| CS004419 | (TriAlk14)a_2NsagucacaAfcCfaAfuaaauguas(invAb) | 759 | (A^{2N})AGUCACAACCAAUAAAUGUA | 863 |
| CS004829 | (NAG37)s(invAb)sggucacaaCfCfAfauaaaugucus(invAb) | 760 | GGUCACAACCAAUAAAUGUCU | 872 |
| CS005406 | (TriAlk14)asgucacaaCfCfAfauaaauguccs(invAb) | 761 | AGUCACAACCAAUAAAUGUCC | 875 |
| CS005629 | (TriAlk14)asaggcugcCfUfUfagcuaucugas(invAb) | 762 | AAGGCUGCCUUAGCUAUCUGA | 876 |
| CS005631 | (TriAlk14)csgcuucaaUfCfGfaccuuuacuas(invAb) | 763 | CGCUUCAAUCGACCUUUACUA | 877 |
| CS005633 | (TriAlk14)gsa_2NaacauuAfAfCfucuaacuguas(invAb) | 764 | G(A^{2N})AACAUUAACUCUAACUGUA | 878 |
| CS005635 | (TriAlk14)a_2NscagaagaGfUfUfucuuaacuuas(invAb) | 765 | (A^{2N})CAGAAGAGUUUCUUAACUUA | 879 |
| CS005637 | (TriAlk14)gsuacuacuCfCfUfcaaauguugas(invAb) | 766 | GUACUACUCCUCAAAUGUUGA | 880 |
| CS005639 | (TriAlk14)csuuccauaAfCfAfuugaugacuas(invAb) | 767 | CUUCCAUAACAUUGAUGACUA | 881 |
| CS005641 | (TriAlk14)gscaaugauAfGfCfaccuaaacuus(invAb) | 768 | GCAAUGAUAGCACCUAAACUU | 882 |
| CS005643 | (TriAlk14)a_2NsagacagaCfAfUfuccuucuacas(invAb) | 769 | (A^{2N})AGACAGACAUUCCUUCUACA | 883 |
| CS005645 | (TriAlk14)csa_2NuguaauGfAfCfacuucuuguas(invAb) | 770 | C(A^{2N})UGUAAUGACACUUCUUGUA | 884 |
| CS005647 | (TriAlk14)a_2NsuacaaguAfGfAfuccugagaaas(invAb) | 771 | (A^{2N})UACAAGUAGAUCCUGAGAAA | 885 |
| CS007200 | (NH2-C6)asgucacaaCfCfAfauaaaugucus(invAb) | 772 | AGUCACAACCAAUAAAUGUCU | 864 |
| CS008694 | (NH2-C6)sasgucacaaCfCfAfauaaaugucus(invAb)C6-SS-C6-dT | 773 | AGUCACAACCAAUAAAUGUCUT | 886 |
| CS914177 | (NAG37)s(invAb)sggaaacucAfGfAfuaaaugcuaas(invAb) | 774 | GGAAACUCAGAUAAAUGCUAA | 866 |
| CS914203 | (NAG37)s(invAb)sagucacaaCfCfAfauaaaugucus(invAb) | 775 | AGUCACAACCAAUAAAUGUCU | 864 |
| CS915060 | (TriAlk14)a_2NsagucacaAfCfCfaauaaauguas(invAb) | 776 | (A^{2N})AGUCACAACCAAUAAAUGUA | 863 |
| CS915061 | (TriAlk14)asgucacaaCfCfAfauaaaugucus(invAb) | 777 | AGUCACAACCAAUAAAUGUCU | 864 |
| CS915705 | (TriAlk14)gsgaaacucAfgAfuAfaaugcuaas(invAb) | 778 | GGAAACUCAGAUAAAUGCUAA | 866 |
| CS916246 | (TriAlk14)gsgucacaaCfCfAfauaaaugucus(invAb) | 779 | GGUCACAACCAAUAAAUGUCU | 872 |
| CS916247 | (TriAlk14)gsgucacaaCfCfAfauaaaugucas(invAb) | 780 | GGUCACAACCAAUAAAUGUCA | 873 |
| CS916248 | (TriAlk14)asgucacaaCfCfAfauaaaugucas(invAb) | 781 | AGUCACAACCAAUAAAUGUCA | 874 |

(A^{2N})=2-aminoadenosine nucleotide; I = hypoxanthine (inosine) nucleotide

TABLE 6
TSLP RNAi Agent Sense Strand Sequences (Shown with Targeting Ligand Conjugate. The structure of
avb6-SM6.1 is shown in Table 11, and the structure of Tri-SM6.1-avb6-TA14 is shown in FIG. 1.)

| | | | Corresponding |
|---|---|---|---|
| | | | Sense Strand |
| | | | (AM Number) |
| | | | Without Linker |
| Strand | | SEQ | or Conjugate |
| ID | Modified Sense Strand (5′→3′) | ID NO. | (See Table 4) |
| CS001922 | Tri-SM6.1-avb6-(TA14)-gsa_2NaucaaaCfCfUfcacaaauucus(invAb) | 782 | |
| CS003220 | Tri-SM6.1-avb6-(TA14)-csugaaacuGfAfGfagaaaugguas(invAb) | 783 | |
| CS003898 | Tri-SM6.1-avb6-(TA14)-csa_2NuugccuUfAfCfugaaauccaas(invAb) | 784 | AM19257-SS-NL |
| CS003900 | Tri-SM6.1-avb6-(TA14)-gsa_2NaauccaGfAfGfccuaaccuuas(invAb) | 785 | AM19259-SS-NL |
| CS003902 | Tri-SM6.1-avb6-(TA14)-gsauucggaAfAfCfucagauaaa_2Nus(invAb) | 786 | AM19261-SS-NL |
| CS003904 | Tri-SM6.1-avb6-(TA14)-a_2NsagucacaAfCfCfaauaaauguas(invAb) | 787 | AM19263-SS-NL |
| CS003906 | Tri-SM6.1-avb6-(TA14)-asgucacaaCfCfAfauaaaugucus(invAb) | 788 | AM19265-SS-NL |
| CS003908 | Tri-SM6.1-avb6-(TA14)-gsaaagucaCfAfAfccaauaaa_2Nuas(invAb) | 789 | AM19267-SS-NL |
| CS003954 | Tri-SM6.1-avb6-(TA14)-gsgaaacucAfGfAfuaaaugcuaas(invAb) | 790 | AM19334-SS-NL |
| CS003956 | Tri-SM6.1-avb6-(TA14)-asuccagagCfCfUfaaccuucaaus(invAb) | 791 | AM19336-SS-NL |
| CS003958 | Tri-SM6.1-avb6-(TA14)-usa_2NcugaaaUfCfCfagagccuaaas(invAb) | 792 | AM19338-SS-NL |
| CS004174 | Tri-SM6.1-avb6-(TA14)-gsgaaacucAfgAfuAfaaugcuaas(invAb) | 793 | AM19940-SS-NL |
| CS004205 | Tri-SM6.1-avb6-(TA14)-asgucacaaCfcAfaUfaaaugucus(invAb) | 794 | AM19948-SS-NL |
| CS004244 | Tri-SM6.1-avb6-(TA14)-asgagccuaAfCfCfuucaaucucas(invAb) | 795 | AM20175-SS-NL |
| CS004246 | Tri-SM6.1-avb6-(TA14)-asgagccuaAfCfCfuucaaucccas(invAb) | 796 | AM20177-SS-NL |
| CS004280 | Tri-SM6.1-avb6-(TA14)-gsgaaacucdAgdAudAaaugcuaas(invAb) | 797 | AM20298-SS-NL |
| CS004291 | Tri-SM6.1-avb6-(TA14)-gsa_2NacucAfGfAfuaaaugcuaas(invAb) | 798 | AM20306-SS-NL |
| CS004392 | Tri-SM6.1-avb6-(TA14)-asgucacAfaCfcAfauaaaugucus(invAb) | 799 | AM20492-SS-NL |
| CS004393 | Tri-SM6.1-avb6-(TA14)-gsgucacaaCfCfAfauaaaugucus(invAb) | 800 | AM20533-SS-NL |
| CS004395 | Tri-SM6.1-avb6-(TA14)-gsgucacaaCfCfAfauaaaugucas(invAb) | 801 | AM20535-SS-NL |
| CS004397 | Tri-SM6.1-avb6-(TA14)-asgucacaaCfCfAfauaaaugucas(invAb) | 802 | AM20537-SS-NL |
| CS004420 | Tri-SM6.1-avb6-(TA14)-a_2NsagucacaAfcCfaAfuaaauguas(invAb) | 803 | CS004419-NL |
| CS005036 | Tri-SM6.1-avb6-(TA14)-gsagucacaAfCfCfaauaaauguas(invAb) | 804 | |
| CS005405 | Tri-SM6.1-avb6-(TA14)-asgucacaaCfCfAfauaaauguccs(invAb) | 805 | CS005406-NL |
| CS005657 | Tri-SM6.1-avb6-(TA14)-asaggcugcCfUfUfagcuaucugas(invAb) | 806 | CS005629-NL |
| CS005658 | Tri-SM6.1-avb6-(TA14)-csgcuucaaUfCfGfaccuuuacuas(invAb) | 807 | CS005631-NL |
| CS005659 | Tri-SM6.1-avb6-(TA14)-gsa_2NaacauuAfAfCfucuaacuguas(invAb) | 808 | CS005633-NL |
| CS005660 | Tri-SM6.1-avb6-(TA14)-a_2NscagaagaGfUfUfucuuaacuuas(invAb) | 809 | CS005635-NL |
| CS005661 | Tri-SM6.1-avb6-(TA14)-gsuacuacuCfCfUfcaaauguugas(invAb) | 810 | CS005637-NL |
| CS005662 | Tri-SM6.1-avb6-(TA14)-csuuccauaAfCfAfuugaugacuas(invAb) | 811 | CS005639-NL |
| CS005663 | Tri-SM6.1-avb6-(TA14)-gscaaugauAfGfCfaccuaaacuus(invAb) | 812 | CS005641-NL |
| CS005664 | Tri-SM6.1-avb6-(TA14)-a_2NsagacagaCfAfUfuccuucuacas(invAb) | 813 | CS005643-NL |
| CS005665 | Tri-SM6.1-avb6-(TA14)-csa_2NuguaauGfAfCfacuucuuguas(invAb) | 814 | CS005645-NL |
| CS005666 | Tri-SM6.1-avb6-(TA14)-a_2NsuacaaguAfGfAfuccugagaaas(invAb) | 815 | CS005647-NL |
| CS005747 | Tri-SM6.1-avb6-(TA14)-gsgucacaaCfCfAfacaaaugucus(invAb) | 816 | |
| CS005748 | Tri-SM6.1-avb6-(TA14)-gsgucacaaCfCfAfauaaacgucus(invAb) | 817 | |
| CS005957 | Tri-SM6.1-avb6-(TA14)-gsgucacaaCfCfAfauaaauguccs(invAb) | 818 | |
| CS005960 | Tri-SM6.1-avb6-(TA14)-gsgucacaaCfCfAfauaaacguccs(invAb) | 819 | |
| CS006344 | Tri-SM6.1-avb6-(TA14)-asgucacaaCfCfAfacaaaugucus(invAb) | 820 | |
| CS006346 | Tri-SM6.1-avb6-(TA14)-gsgucacaaCfCfAfacaaaugucas(invAb) | 821 | |
| CS006349 | Tri-SM6.1-avb6-(TA14)-asgucacaaCfCfAfauaaacgucus(invAb) | 822 | |

[0111] The TSLP RNAi agents disclosed herein are formed by annealing an antisense strand with a sense strand. A sense strand containing a sequence listed in Table 2, Table 4, Table 5, or Table 6 can be hybridized to any antisense strand containing a sequence listed in Table 2 or Table 3, provided the two sequences have a region of at least 85% complementarity over a contiguous 16, 17, 18, 19, 20, or 21 nucleotide sequence.

[0112] As shown in Table 5 above, certain of the example TSLP RNAi agent nucleotide sequences are shown to further include reactive linking groups at one or both of the 5′ terminal end and the 3′ terminal end of the sense strand. For example, many of the TSLP RNAi agent sense strand sequences shown in Table 5 above have a (TriAlk14) linking group at the 5′ end of the nucleotide sequence. Other linking groups, such as an (NH2-C6) linking group or a (6-SS-6) or (C6-SS-C6) linking group, may be present as well or alternatively in certain embodiments. Such reactive linking groups are positioned to facilitate the linking of targeting ligands, targeting groups, and/or PK/PD modulators to the TSLP RNAi agents disclosed herein. Linking or conjugation reactions are well known in the art and provide for formation of covalent linkages between two molecules or reactants. Suitable conjugation reactions for use in the scope of the inventions herein include, but are not limited to, amide coupling reaction, Michael addition reaction, hydrazone formation reaction, inverse-demand Diels-Alder cycloaddition reaction, oxime ligation, and Copper (I)-catalyzed or strain-promoted azide-alkyne cycloaddition reaction cycloaddition reaction.

[0113] In some embodiments, targeting ligands, such as the integrin targeting ligands shown in the examples and figures disclosed herein, can be synthesized as activated esters, such as tetrafluorophenyl (TFP) esters, which can be displaced by a reactive amino group (e.g., NH₂-C₆) to attach the targeting ligand to the TSLP RNAi agents disclosed herein. In some embodiments, targeting ligands are synthesized as azides, which can be conjugated to a propargyl (e.g., TriAlk14) or DBCO group, for example, via Copper (I)-catalyzed or strain-promoted azide-alkyne cycloaddition reaction.

[0114] Additionally, certain of the nucleotide sequences can be synthesized with a dT nucleotide at the 3′ terminal end of the sense strand, followed by (3′→5′) a linker (e.g., C6-SS-C6). The linker can, in some embodiments, facilitate the linkage to additional components, such as, for example, a PK/PD modulator or one or more targeting ligands. As described herein, the disulfide bond of C6-SS-C6 is first reduced, removing the dT from the molecule, which can then facilitate the conjugation of the desired PK/PD modulator. The terminal dT nucleotide therefore is not a part of the fully conjugated construct.

[0115] In some embodiments, the antisense strand of a TSLP RNAi agent disclosed herein differs by 0, 1, 2, or 3 nucleotides from any of the antisense strand sequences in Table 3 or Table 10. In some embodiments, the sense strand of a TSLP RNAi agent disclosed herein differs by 0, 1, 2, or 3 nucleotides from any of the sense strand sequences in Table 4, Table 5, Table 6, or Table 10.

[0116] In some embodiments, a TSLP RNAi agent antisense strand comprises a nucleotide sequence of any of the sequences in Table 2 or Table 3. In some embodiments, a TSLP RNAi agent antisense strand comprises the sequence of nucleotides (from 5′ end→3′ end) 1-17, 2-17, 1-18, 2-18, 1-19, 2-19, 1-20, 2-20, 1-21, 2-21, 1-22, 2-22, 1-23, 2-23, 1-24, or 2-24 of any of the sequences in Table 2, Table 3, or Table 10. In certain embodiments, a TSLP RNAi agent antisense strand comprises or consists of a modified sequence of any one of the modified sequences in Table 3 or Table 10.

[0117] In some embodiments, a TSLP RNAi agent sense strand comprises the nucleotide sequence of any of the sequences in Table 2 or Table 4. In some embodiments, a TSLP RNAi agent sense strand comprises the sequence of nucleotides (from 5′ end→3′ end) 1-17, 2-17, 3-17, 4-17, 1-18, 2-18, 3-18, 4-18, 1-19, 2-19, 3-19, 4-19, 1-20, 2-20, 3-20, 4-20, 1-21, 2-21, 3-21, 4-21, 1-22, 2-22, 3-22, 4-22, 1-23, 2-23, 3-23, 4-23, 1-24, 2-24, 3-24, or 4-24, of any of the sequences in Table 2, Table 4, Table 5, Table 6, or Table 10. In certain embodiments, a TSLP RNAi agent sense strand comprises or consists of a modified sequence of any one of the modified sequences in Table 3 or Table 10.

[0118] For the RNAi agents disclosed herein, the nucleotide at position 1 of the antisense strand (from 5′ end→3′ end) can be perfectly complementary to a TSLP gene, or can be non-complementary to a TSLP gene. In some embodiments, the nucleotide at position 1 of the antisense strand (from 5′ end→3′ end) is a U, A, or dT (or a modified version of U, A or dT). In some embodiments, the nucleotide at position 1 of the antisense strand (from 5′ end→3′ end) forms an A:U or U:A base pair with the sense strand.

[0119] In some embodiments, a TSLP RNAi agent antisense strand comprises the sequence of nucleotides (from 5′ end→3′ end) 2-18 or 2-19 of any of the antisense strand sequences in Table 2, Table 3, or Table 10. In some embodiments, a TSLP RNAi sense strand comprises the sequence of nucleotides (from 5′ end→3′ end) 1-17 or 1-18 of any of the sense strand sequences in Table 2, Table 4, Table 5, Table 6, or Table 10.

[0120] In some embodiments, a TSLP RNAi agent includes (i) an antisense strand comprising the sequence of nucleotides (from 5′ end→3′ end) 2-18 or 2-19 of any of the antisense strand sequences in Table 2, Table 3, or Table 10, and (ii) a sense strand comprising the sequence of nucleotides (from 5′ end→3′ end) 1-17 or 1-18 of any of the sense strand sequences in Table 2, Table 4, Table 5, Table 6, or Table 10.

[0121] A sense strand containing a sequence listed in Table 2 or Table 4 can be hybridized to any antisense strand containing a sequence listed in Table 2 or Table 3 provided the two sequences have a region of at least 85% complementarity over a contiguous 16, 17, 18, 19, 20, or 21 nucleotide sequence. In some embodiments, the TSLP RNAi agent has a sense strand consisting of the modified sequence of any of the modified sequences in Table 4, Table 5, Table 6, or Table 10, and an antisense strand consisting of the modified sequence of any of the modified sequences in Table 3 or Table 10. Certain representative sequence pairings are exemplified by the Duplex ID Nos. shown in Tables 7A, 7B, 8, and 9.

[0122] In some embodiments, a TSLP RNAi agent comprises, consists of, or consists essentially of a duplex represented by any one of the Duplex ID Nos. presented herein. In some embodiments, a TSLP RNAi agent consists of any of the Duplex ID Nos. presented herein. In some embodiments, a TSLP RNAi agent comprises the sense strand and antisense strand nucleotide sequences of any of the Duplex ID Nos. presented herein. In some embodiments, a TSLP RNAi agent comprises the sense strand and antisense strand nucleotide sequences of any of the Duplex ID Nos. presented herein and a targeting group, linking group, and/or other non-nucleotide group wherein the targeting group, linking group, and/or other non-nucleotide group is covalently linked (i.e., conjugated) to the sense strand or the antisense strand. In some embodiments, a TSLP RNAi agent includes the sense strand and antisense strand modified nucleotide sequences of any of the Duplex ID Nos. presented herein. In some embodiments, a TSLP RNAi agent comprises the sense strand and antisense strand modified nucleotide sequences of any of the Duplex ID Nos. presented herein and a targeting group, linking group, and/or other non-nucleotide group, wherein the targeting group, linking group, and/or other non-nucleotide group is covalently linked to the sense strand or the antisense strand.

[0123] In some embodiments, a TSLP RNAi agent comprises an antisense strand and a sense strand having the nucleotide sequences of any of the antisense strand/sense strand duplexes of Tables 2, 7A, 7B, 8, 9, or 10, and comprises a targeting group. In some embodiments, a TSLP RNAi agent comprises an antisense strand and a sense strand having the nucleotide sequences of any of the antisense strand/sense strand duplexes of Tables 2, 7A, 7B, 8, 9, or 10, and comprises one or more αvβ6 integrin targeting ligands.

[0124] In some embodiments, a TSLP RNAi agent comprises an antisense strand and a sense strand having the nucleotide sequences of any of the antisense strand/sense strand duplexes of Tables 2, 7A, 7B, 8, 9, or 10, and comprises a targeting group that is an integrin targeting ligand. In some embodiments, a TSLP RNAi agent comprises an antisense strand and a sense strand having the nucleotide sequences of any of the antisense strand/sense strand duplexes of Tables 2, 7A, 7B, 8, 9, or 10, and comprises one or more αvβ6 integrin targeting ligands or clusters of αvβ6 integrin targeting ligands (e.g., a tridentate αvβ6 integrin targeting ligand).

[0125] In some embodiments, a TSLP RNAi agent comprises an antisense strand and a sense strand having the modified nucleotide sequences of any of the antisense strand/sense strand duplexes of Tables 7A, 7B, 8, 9, and 10.

[0126] In some embodiments, a TSLP RNAi agent comprises an antisense strand and a sense strand having the modified nucleotide sequences of any of the antisense strand/sense strand duplexes of Tables 7A, 7B, 8, 9, and 10, and comprises an integrin targeting ligand.

[0127] In some embodiments, a TSLP RNAi agent comprises, consists of, or consists essentially of any of the duplexes of Tables 7A, 7B, 8, 9, and 10.

TABLE 7A
TSLP RNAi Agent Duplexes with Corresponding Sense and Antisense Strand
ID Numbers and Sequence ID numbers for the modified and unmodified
nucleotide sequences. (Shown without Linking Agents or Conjugates)

| | | AS | AS | | SS | SS |
|---|---|---|---|---|---|---|
| | | modified | unmodified | | modified | unmodified |
| | | SEQ ID | SEQ ID | | SEQ ID | SEQ ID |
| Duplex | AS ID | NO: | NO: | SS ID | NO: | NO: |
| AD13575 | AM19258-AS | 591 | 827 | AM19257-SS-NL | 698 | 860 |
| AD13576 | AM19260-AS | 592 | 828 | AM19259-SS-NL | 699 | 861 |
| AD13577 | AM19262-AS | 593 | 829 | AM19261-SS-NL | 700 | 862 |
| AD13578 | AM19264-AS | 594 | 826 | AM19263-SS-NL | 701 | 863 |
| AD13579 | AM19266-AS | 595 | 830 | AM19265-SS-NL | 702 | 864 |
| AD13580 | AM19268-AS | 596 | 831 | AM19267-SS-NL | 703 | 865 |
| AD13581 | AM18311-AS | 590 | 826 | AM19263-SS-NL | 701 | 863 |
| AD13635 | AM19335-AS | 597 | 825 | AM19334-SS-NL | 704 | 866 |
| AD13636 | AM19337-AS | 598 | 832 | AM19336-SS-NL | 705 | 867 |
| AD13637 | AM19339-AS | 599 | 833 | AM19338-SS-NL | 706 | 868 |
| AD13942 | AM19685-AS | 600 | 825 | AM19334-SS-NL | 704 | 866 |
| AD13943 | AM18285-AS | 589 | 825 | AM19334-SS-NL | 704 | 866 |
| AD14173 | AM19938-AS | 601 | 825 | AM19334-SS-NL | 704 | 866 |
| AD14174 | AM19939-AS | 602 | 825 | AM19334-SS-NL | 704 | 866 |
| AD14175 | AM19335-AS | 597 | 825 | AM19940-SS-NL | 707 | 866 |
| AD14176 | AM19941-AS | 603 | 825 | AM19334-SS-NL | 704 | 866 |
| AD14177 | AM19942-AS | 604 | 825 | AM19334-SS-NL | 704 | 866 |
| AD14178 | AM19943-AS | 605 | 825 | AM19334-SS-NL | 704 | 866 |
| AD14179 | AM19944-AS | 606 | 825 | AM19334-SS-NL | 704 | 866 |
| AD14180 | AM19945-AS | 607 | 825 | AM19334-SS-NL | 704 | 866 |
| AD14181 | AM19946-AS | 608 | 897 | AM19334-SS-NL | 704 | 866 |
| AD14182 | AM19947-AS | 609 | 830 | AM19265-SS-NL | 702 | 864 |
| AD14183 | AM19266-AS | 595 | 830 | AM19948-SS-NL | 708 | 864 |
| AD14184 | AM19949-AS | 610 | 830 | AM19265-SS-NL | 702 | 864 |
| AD14185 | AM19950-AS | 611 | 830 | AM19265-SS-NL | 702 | 864 |
| AD14186 | AM19951-AS | 612 | 830 | AM19265-SS-NL | 702 | 864 |
| AD14187 | AM19952-AS | 613 | 830 | AM19265-SS-NL | 702 | 864 |
| AD14188 | AM19953-AS | 614 | 830 | AM19265-SS-NL | 702 | 864 |
| AD14189 | AM19954-AS | 615 | 830 | AM19265-SS-NL | 702 | 864 |
| AD14190 | AM19955-AS | 616 | 830 | AM19265-SS-NL | 702 | 864 |
| AD14378 | AM20176-AS | 617 | 834 | AM20175-SS-NL | 709 | 869 |
| AD14379 | AM20176-AS | 617 | 834 | AM20177-SS-NL | 710 | 870 |
| AD14481 | AM19941-AS | 603 | 825 | AM19940-SS-NL | 707 | 866 |
| AD14482 | AM19941-AS | 603 | 825 | AM20298-SS-NL | 711 | 866 |
| AD14483 | AM20299-AS | 618 | 825 | AM19334-SS-NL | 704 | 866 |
| AD14484 | AM20300-AS | 619 | 898 | AM19334-SS-NL | 704 | 866 |
| AD14485 | AM20301-AS | 620 | 899 | AM19334-SS-NL | 704 | 866 |
| AD14486 | AM20302-AS | 621 | 899 | AM19334-SS-NL | 704 | 866 |
| AD14487 | AM20302-AS | 621 | 899 | AM20298-SS-NL | 711 | 866 |
| AD14488 | AM20303-AS | 622 | 825 | AM19334-SS-NL | 704 | 866 |
| AD14489 | AM20304-AS | 623 | 900 | AM19334-SS-NL | 704 | 866 |
| AD14490 | AM20305-AS | 624 | 825 | AM19334-SS-NL | 704 | 866 |
| AD14491 | AM20307-AS | 625 | 835 | AM20306-SS-NL | 712 | 871 |
| AD14492 | AM20308-AS | 626 | 825 | AM19334-SS-NL | 704 | 866 |
| AD14493 | AM20309-AS | 627 | 825 | AM19334-SS-NL | 704 | 866 |
| AD14494 | AM20310-AS | 628 | 825 | AM19334-SS-NL | 704 | 866 |
| AD14500 | AM20314-AS | 629 | 899 | AM19334-SS-NL | 704 | 866 |
| AD14501 | AM20315-AS | 630 | 899 | AM19334-SS-NL | 704 | 866 |
| AD14502 | AM20315-AS | 630 | 899 | AM20298-SS-NL | 711 | 866 |
| AD14629 | AM20487-AS | 631 | 826 | AM19263-SS-NL | 701 | 863 |
| AD14630 | AM20488-AS | 632 | 830 | AM19265-SS-NL | 702 | 864 |
| AD14631 | AM20489-AS | 633 | 830 | AM19265-SS-NL | 702 | 864 |
| AD14632 | AM20490-AS | 634 | 830 | AM19265-SS-NL | 702 | 864 |
| AD14633 | AM20491-AS | 635 | 825 | AM19334-SS-NL | 704 | 866 |
| AD14634 | AM19947-AS | 609 | 830 | AM20492-SS-NL | 713 | 864 |
| AD14635 | AM19947-AS | 609 | 830 | AM19948-SS-NL | 708 | 864 |
| AD14673 | AM20534-AS | 636 | 836 | AM20533-SS-NL | 714 | 872 |
| AD14674 | AM20536-AS | 637 | 837 | AM20535-SS-NL | 715 | 873 |
| AD14675 | AM20538-AS | 638 | 838 | AM20537-SS-NL | 716 | 874 |
| AD14676 | AM20539-AS | 639 | 838 | AM20537-SS-NL | 716 | 874 |
| AD14677 | AM20540-AS | 640 | 838 | AM20537-SS-NL | 716 | 874 |
| AC003561 | CA004416 | 643 | 826 | CS915060-NL | 734 | 863 |
| AC003562 | CA004416 | 643 | 826 | CS004419-NL | 717 | 863 |
| AC003563 | CA004417 | 644 | 826 | CS915060-NL | 734 | 863 |
| AC003564 | CA004417 | 644 | 826 | CS004419-NL | 717 | 863 |
| AC003565 | CA004418 | 645 | 826 | CS004419-NL | 717 | 863 |
| AC003566 | CA004418 | 645 | 826 | CS915060-NL | 734 | 863 |
| AC003595 | CA004450 | 646 | 837 | CS916247-NL | 738 | 873 |
| AC003596 | CA004451 | 647 | 836 | CS916246-NL | 737 | 872 |
| AC003599 | CA004452 | 648 | 837 | CS916247-NL | 738 | 873 |
| AC003600 | CA004453 | 649 | 836 | CS916246-NL | 737 | 872 |
| AC003657 | CA004518 | 650 | 838 | CS916248-NL | 739 | 874 |
| AC003658 | CA004519 | 651 | 837 | CS916247-NL | 738 | 873 |
| AC003679 | CA004538 | 652 | 830 | CS914203-NL | 733 | 864 |
| AC003842 | CA004288 | 642 | 825 | CS915705-NL | 736 | 866 |
| AC003920 | CA004830 | 653 | 836 | CS004829-NL | 718 | 872 |
| AC003923 | CA004833 | 654 | 836 | CS004829-NL | 718 | 872 |
| AC003989 | CA004288 | 642 | 825 | CS914177-NL | 732 | 866 |
| AC004080 | CA005032 | 656 | 830 | CS915061-NL | 735 | 864 |
| AC004081 | CA005035 | 659 | 826 | CS915060-NL | 734 | 863 |
| AC004359 | CA005404 | 662 | 840 | CS915061-NL | 735 | 864 |
| AC004360 | CA005404 | 662 | 840 | CS005406-NL | 719 | 875 |
| AC004362 | CA005407 | 663 | 841 | CS915061-NL | 735 | 864 |
| AC004366 | CA005410 | 664 | 830 | CS915061-NL | 735 | 864 |
| AC004367 | CA005411 | 665 | 830 | CS915061-NL | 735 | 864 |
| AC004368 | CA005412 | 666 | 830 | CS915061-NL | 735 | 864 |
| AC004369 | CA005413 | 667 | 902 | CS915061-NL | 735 | 864 |
| AC004370 | CA005414 | 668 | 903 | CS915061-NL | 735 | 864 |
| AC004371 | CA005415 | 669 | 830 | CS915061-NL | 735 | 864 |
| AC004547 | CA005630 | 670 | 842 | CS005629-NL | 720 | 876 |
| AC004548 | CA005632 | 671 | 843 | CS005631-NL | 721 | 877 |
| AC004549 | CA005634 | 672 | 844 | CS005633-NL | 722 | 878 |
| AC004550 | CA005636 | 673 | 845 | CS005635-NL | 723 | 879 |
| AC004551 | CA005638 | 674 | 846 | CS005637-NL | 724 | 880 |
| AC004552 | CA005640 | 675 | 847 | CS005639-NL | 725 | 881 |
| AC004553 | CA005642 | 676 | 848 | CS005641-NL | 726 | 882 |
| AC004554 | CA005644 | 677 | 849 | CS005643-NL | 727 | 883 |
| AC004555 | CA005646 | 678 | 850 | CS005645-NL | 728 | 884 |
| AC004556 | CA005648 | 679 | 851 | CS005647-NL | 729 | 885 |
| AC004836 | CA005976 | 687 | 855 | CS916246-NL | 737 | 872 |
| AC005235 | CA006383 | 697 | 859 | CS916248-NL | 739 | 874 |
| AC005248 | CA006350 | 696 | 841 | CS915061-NL | 735 | 864 |
| AC005941 | CA004207 | 641 | 830 | CS007200-NL | 730 | 864 |
| AC005942 | CA005056 | 661 | 840 | CS915061-NL | 735 | 864 |
| AC005943 | CA004538 | 652 | 830 | CS915061-NL | 735 | 864 |
| AC007332 | CA005404 | 662 | 840 | CS008694-NL | 731 | 864 |
| AC007334 | CA004207 | 641 | 830 | CS008694-NL | 731 | 864 |

TABLE 7B
TSLP RNAi Agent Duplexes with Corresponding Sense and Antisense Strand ID Numbers
and Sequence ID numbers for the modified and unmodified nucleotide sequences.

| | | AS | | | SS | SS |
|---|---|---|---|---|---|---|
| | | modified | AS | | modified | unmodified |
| | | SEQ ID | unmodified | | SEQ ID | SEQ ID |
| Duplex | AS ID | NO: | SEQ ID NO: | SS ID | NO: | NO: |
| AD13575 | AM19258-AS | 591 | 827 | AM19257-SS | 740 | 860 |
| AD13576 | AM19260-AS | 592 | 828 | AM19259-SS | 741 | 861 |
| AD13577 | AM19262-AS | 593 | 829 | AM19261-SS | 742 | 862 |
| AD13578 | AM19264-AS | 594 | 826 | AM19263-SS | 743 | 863 |
| AD13579 | AM19266-AS | 595 | 830 | AM19265-SS | 744 | 864 |
| AD13580 | AM19268-AS | 596 | 831 | AM19267-SS | 745 | 865 |
| AD13581 | AM18311-AS | 590 | 826 | AM19263-SS | 743 | 863 |
| AD13635 | AM19335-AS | 597 | 825 | AM19334-SS | 746 | 866 |
| AD13636 | AM19337-AS | 598 | 832 | AM19336-SS | 747 | 867 |
| AD13637 | AM19339-AS | 599 | 833 | AM19338-SS | 748 | 868 |
| AD13942 | AM19685-AS | 600 | 825 | AM19334-SS | 746 | 866 |
| AD13943 | AM18285-AS | 589 | 825 | AM19334-SS | 746 | 866 |
| AD14173 | AM19938-AS | 601 | 825 | AM19334-SS | 746 | 866 |
| AD14174 | AM19939-AS | 602 | 825 | AM19334-SS | 746 | 866 |
| AD14175 | AM19335-AS | 597 | 825 | AM19940-SS | 749 | 866 |
| AD14176 | AM19941-AS | 603 | 825 | AM19334-SS | 746 | 866 |
| AD14177 | AM19942-AS | 604 | 825 | AM19334-SS | 746 | 866 |
| AD14178 | AM19943-AS | 605 | 825 | AM19334-SS | 746 | 866 |
| AD14179 | AM19944-AS | 606 | 825 | AM19334-SS | 746 | 866 |
| AD14180 | AM19945-AS | 607 | 825 | AM19334-SS | 746 | 866 |
| AD14181 | AM19946-AS | 608 | 897 | AM19334-SS | 746 | 866 |
| AD14182 | AM19947-AS | 609 | 830 | AM19265-SS | 744 | 864 |
| AD14183 | AM19266-AS | 595 | 830 | AM19948-SS | 750 | 864 |
| AD14184 | AM19949-AS | 610 | 830 | AM19265-SS | 744 | 864 |
| AD14185 | AM19950-AS | 611 | 830 | AM19265-SS | 744 | 864 |
| AD14186 | AM19951-AS | 612 | 830 | AM19265-SS | 744 | 864 |
| AD14187 | AM19952-AS | 613 | 830 | AM19265-SS | 744 | 864 |
| AD14188 | AM19953-AS | 614 | 830 | AM19265-SS | 744 | 864 |
| AD14189 | AM19954-AS | 615 | 830 | AM19265-SS | 744 | 864 |
| AD14190 | AM19955-AS | 616 | 830 | AM19265-SS | 744 | 864 |
| AD14378 | AM20176-AS | 617 | 834 | AM20175-SS | 751 | 869 |
| AD14379 | AM20176-AS | 617 | 834 | AM20177-SS | 752 | 870 |
| AD14481 | AM19941-AS | 603 | 825 | AM19940-SS | 749 | 866 |
| AD14482 | AM19941-AS | 603 | 825 | AM20298-SS | 753 | 866 |
| AD14483 | AM20299-AS | 618 | 825 | AM19334-SS | 746 | 866 |
| AD14484 | AM20300-AS | 619 | 898 | AM19334-SS | 746 | 866 |
| AD14485 | AM20301-AS | 620 | 899 | AM19334-SS | 746 | 866 |
| AD14486 | AM20302-AS | 621 | 899 | AM19334-SS | 746 | 866 |
| AD14487 | AM20302-AS | 621 | 899 | AM20298-SS | 753 | 866 |
| AD14488 | AM20303-AS | 622 | 825 | AM19334-SS | 746 | 866 |
| AD14489 | AM20304-AS | 623 | 900 | AM19334-SS | 746 | 866 |
| AD14490 | AM20305-AS | 624 | 825 | AM19334-SS | 746 | 866 |
| AD14491 | AM20307-AS | 625 | 835 | AM20306-SS | 754 | 871 |
| AD14492 | AM20308-AS | 626 | 825 | AM19334-SS | 746 | 866 |
| AD14493 | AM20309-AS | 627 | 825 | AM19334-SS | 746 | 866 |
| AD14494 | AM20310-AS | 628 | 825 | AM19334-SS | 746 | 866 |
| AD14500 | AM20314-AS | 629 | 899 | AM19334-SS | 746 | 866 |
| AD14501 | AM20315-AS | 630 | 899 | AM19334-SS | 746 | 866 |
| AD14502 | AM20315-AS | 630 | 899 | AM20298-SS | 753 | 866 |
| AD14629 | AM20487-AS | 631 | 826 | AM19263-SS | 743 | 863 |
| AD14630 | AM20488-AS | 632 | 830 | AM19265-SS | 744 | 864 |
| AD14631 | AM20489-AS | 633 | 830 | AM19265-SS | 744 | 864 |
| AD14632 | AM20490-AS | 634 | 830 | AM19265-SS | 744 | 864 |
| AD14633 | AM20491-AS | 635 | 825 | AM19334-SS | 746 | 866 |
| AD14634 | AM19947-AS | 609 | 830 | AM20492-SS | 755 | 864 |
| AD14635 | AM19947-AS | 609 | 830 | AM19948-SS | 750 | 864 |
| AD14673 | AM20534-AS | 636 | 836 | AM20533-SS | 756 | 872 |
| AD14674 | AM20536-AS | 637 | 837 | AM20535-SS | 757 | 873 |
| AD14675 | AM20538-AS | 638 | 838 | AM20537-SS | 758 | 874 |
| AD14676 | AM20539-AS | 639 | 838 | AM20537-SS | 758 | 874 |
| AD14677 | AM20540-AS | 640 | 838 | AM20537-SS | 758 | 874 |
| AC003561 | CA004416 | 643 | 826 | CS915060 | 776 | 863 |
| AC003562 | CA004416 | 643 | 826 | CS004419 | 759 | 863 |
| AC003563 | CA004417 | 644 | 826 | CS915060 | 776 | 863 |
| AC003564 | CA004417 | 644 | 826 | CS004419 | 759 | 863 |
| AC003565 | CA004418 | 645 | 826 | CS004419 | 759 | 863 |
| AC003566 | CA004418 | 645 | 826 | CS915060 | 776 | 863 |
| AC003595 | CA004450 | 646 | 837 | CS916247 | 780 | 873 |
| AC003596 | CA004451 | 647 | 836 | CS916246 | 779 | 872 |
| AC003599 | CA004452 | 648 | 837 | CS916247 | 780 | 873 |
| AC003600 | CA004453 | 649 | 836 | CS916246 | 779 | 872 |
| AC003657 | CA004518 | 650 | 838 | CS916248 | 781 | 874 |
| AC003658 | CA004519 | 651 | 837 | CS916247 | 780 | 873 |
| AC003679 | CA004538 | 652 | 830 | CS914203 | 775 | 864 |
| AC003842 | CA004288 | 642 | 825 | CS915705 | 778 | 866 |
| AC003920 | CA004830 | 653 | 836 | CS004829 | 760 | 872 |
| AC003923 | CA004833 | 654 | 836 | CS004829 | 760 | 872 |
| AC003989 | CA004288 | 642 | 825 | CS914177 | 774 | 866 |
| AC004080 | CA005032 | 656 | 830 | CS915061 | 777 | 864 |
| AC004081 | CA005035 | 659 | 826 | CS915060 | 776 | 863 |
| AC004359 | CA005404 | 662 | 840 | CS915061 | 777 | 864 |
| AC004360 | CA005404 | 662 | 840 | CS005406 | 761 | 875 |
| AC004362 | CA005407 | 663 | 841 | CS915061 | 777 | 864 |
| AC004366 | CA005410 | 664 | 830 | CS915061 | 777 | 864 |
| AC004367 | CA005411 | 665 | 830 | CS915061 | 777 | 864 |
| AC004368 | CA005412 | 666 | 830 | CS915061 | 777 | 864 |
| AC004369 | CA005413 | 667 | 902 | CS915061 | 777 | 864 |
| AC004370 | CA005414 | 668 | 903 | CS915061 | 777 | 864 |
| AC004371 | CA005415 | 669 | 830 | CS915061 | 777 | 864 |
| AC004547 | CA005630 | 670 | 842 | CS005629 | 762 | 876 |
| AC004548 | CA005632 | 671 | 843 | CS005631 | 763 | 877 |
| AC004549 | CA005634 | 672 | 844 | CS005633 | 764 | 878 |
| AC004550 | CA005636 | 673 | 845 | CS005635 | 765 | 879 |
| AC004551 | CA005638 | 674 | 846 | CS005637 | 766 | 880 |
| AC004552 | CA005640 | 675 | 847 | CS005639 | 767 | 881 |
| AC004553 | CA005642 | 676 | 848 | CS005641 | 768 | 882 |
| AC004554 | CA005644 | 677 | 849 | CS005643 | 769 | 883 |
| AC004555 | CA005646 | 678 | 850 | CS005645 | 770 | 884 |
| AC004556 | CA005648 | 679 | 851 | CS005647 | 771 | 885 |
| AC004836 | CA005976 | 687 | 855 | CS916246 | 779 | 872 |
| AC005235 | CA006383 | 697 | 859 | CS916248 | 781 | 874 |
| AC005248 | CA006350 | 696 | 841 | CS915061 | 777 | 864 |
| AC005941 | CA004207 | 641 | 830 | CS007200 | 772 | 864 |
| AC005942 | CA005056 | 661 | 840 | CS915061 | 777 | 864 |
| AC005943 | CA004538 | 652 | 830 | CS915061 | 777 | 864 |
| AC007332 | CA005404 | 662 | 840 | CS008694 | 773 | 886 |
| AC007334 | CA004207 | 641 | 830 | CS008694 | 773 | 886 |

TABLE 8
TSLP RNAi Agent Conjugate Duplexes with Corresponding Sense and Antisense
Strand ID Numbers and Sequence ID numbers for the modified and unmodified
nucleotide sequences. (Shown with Targeting Ligand Conjugates)

| | | AS | AS | | SS | SS |
|---|---|---|---|---|---|---|
| | | modified | unmodified | | modified | unmodified |
| | | SEQ ID | SEQ ID | | SEQ ID | SEQ ID |
| Duplex | AS ID | NO: | NO: | SS ID | NO: | NO: |
| AC001714 | AM14179-AS | 587 | 823 | CS001922 | 782 | 887 |
| AC002515 | AM16334-AS | 588 | 824 | CS003220 | 783 | 888 |
| AC003096 | AM19258-AS | 591 | 827 | CS003898 | 784 | 860 |
| AC003097 | AM19260-AS | 592 | 828 | CS003900 | 785 | 861 |
| AC003098 | AM19262-AS | 593 | 829 | CS003902 | 786 | 862 |
| AC003099 | AM19264-AS | 594 | 826 | CS003904 | 787 | 863 |
| AC003100 | AM19266-AS | 595 | 830 | CS003906 | 788 | 864 |
| AC003101 | AM19268-AS | 596 | 831 | CS003908 | 789 | 865 |
| AC003102 | AM18311-AS | 590 | 826 | CS003904 | 787 | 863 |
| AC003128 | AM19335-AS | 597 | 825 | CS003954 | 790 | 866 |
| AC003129 | AM19337-AS | 598 | 832 | CS003956 | 791 | 867 |
| AC003130 | AM19339-AS | 599 | 833 | CS003958 | 792 | 868 |
| AC003252 | AM18285-AS | 589 | 825 | CS003954 | 790 | 866 |
| AC003253 | AM19685-AS | 600 | 825 | CS003954 | 790 | 866 |
| AC003339 | AM19938-AS | 601 | 825 | CS003954 | 790 | 866 |
| AC003340 | AM19939-AS | 602 | 825 | CS003954 | 790 | 866 |
| AC003341 | AM19335-AS | 597 | 825 | CS004174 | 793 | 866 |
| AC003342 | AM19941-AS | 603 | 825 | CS003954 | 790 | 866 |
| AC003343 | AM19942-AS | 604 | 825 | CS003954 | 790 | 866 |
| AC003344 | AM19943-AS | 605 | 825 | CS003954 | 790 | 866 |
| AC003345 | AM19944-AS | 606 | 825 | CS003954 | 790 | 866 |
| AC003346 | AM19945-AS | 607 | 825 | CS003954 | 790 | 866 |
| AC003347 | AM19946-AS | 608 | 897 | CS003954 | 790 | 866 |
| AC003371 | AM19947-AS | 609 | 830 | CS003906 | 788 | 864 |
| AC003372 | AM19266-AS | 595 | 830 | CS004205 | 794 | 864 |
| AC003373 | AM19949-AS | 610 | 830 | CS003906 | 788 | 864 |
| AC003374 | AM19950-AS | 611 | 830 | CS003906 | 788 | 864 |
| AC003375 | AM19951-AS | 612 | 830 | CS003906 | 788 | 864 |
| AC003376 | AM19952-AS | 613 | 830 | CS003906 | 788 | 864 |
| AC003377 | AM19953-AS | 614 | 830 | CS003906 | 788 | 864 |
| AC003378 | AM19954-AS | 615 | 830 | CS003906 | 788 | 864 |
| AC003379 | AM19955-AS | 616 | 830 | CS003906 | 788 | 864 |
| AC003415 | AM20176-AS | 617 | 834 | CS004244 | 795 | 869 |
| AC003416 | AM20176-AS | 617 | 834 | CS004246 | 796 | 870 |
| AC003446 | AM19941-AS | 603 | 825 | CS004174 | 793 | 866 |
| AC003447 | AM19941-AS | 603 | 825 | CS004280 | 797 | 866 |
| AC003448 | AM20299-AS | 618 | 825 | CS003954 | 790 | 866 |
| AC003449 | AM20300-AS | 619 | 898 | CS003954 | 790 | 866 |
| AC003450 | AM20314-AS | 629 | 899 | CS003954 | 790 | 866 |
| AC003451 | AM20315-AS | 630 | 899 | CS003954 | 790 | 866 |
| AC003452 | AM20315-AS | 630 | 899 | CS004280 | 797 | 866 |
| AC003453 | AM20303-AS | 622 | 825 | CS003954 | 790 | 866 |
| AC003454 | AM20308-AS | 626 | 825 | CS003954 | 790 | 866 |
| AC003455 | AM20309-AS | 627 | 825 | CS003954 | 790 | 866 |
| AC003456 | AM20310-AS | 628 | 825 | CS003954 | 790 | 866 |
| AC003457 | AM20304-AS | 623 | 900 | CS003954 | 790 | 866 |
| AC003458 | AM20305-AS | 624 | 825 | CS003954 | 790 | 866 |
| AC003459 | AM20307-AS | 625 | 835 | CS004291 | 798 | 871 |
| AC003511 | AM20487-AS | 631 | 826 | CS003904 | 787 | 863 |
| AC003537 | AM20488-AS | 632 | 830 | CS003906 | 788 | 864 |
| AC003538 | AM20489-AS | 633 | 830 | CS003906 | 788 | 864 |
| AC003539 | AM20490-AS | 634 | 830 | CS003906 | 788 | 864 |
| AC003540 | AM20491-AS | 635 | 825 | CS003954 | 790 | 866 |
| AC003541 | AM19947-AS | 609 | 830 | CS004392 | 799 | 864 |
| AC003542 | AM19947-AS | 609 | 830 | CS004205 | 794 | 864 |
| AC003543 | AM20534-AS | 636 | 836 | CS004393 | 800 | 872 |
| AC003544 | AM20536-AS | 637 | 837 | CS004395 | 801 | 873 |
| AC003545 | AM20538-AS | 638 | 838 | CS004397 | 802 | 874 |
| AC003546 | AM20539-AS | 639 | 838 | CS004397 | 802 | 874 |
| AC003547 | AM20540-AS | 640 | 838 | CS004397 | 802 | 874 |
| AC003567 | CA004416 | 643 | 826 | CS003904 | 787 | 863 |
| AC003568 | CA004416 | 643 | 826 | CS004420 | 803 | 863 |
| AC003569 | CA004417 | 644 | 826 | CS003904 | 787 | 863 |
| AC003570 | CA004417 | 644 | 826 | CS004420 | 803 | 863 |
| AC003571 | CA004418 | 645 | 826 | CS004420 | 803 | 863 |
| AC003572 | CA004418 | 645 | 826 | CS003904 | 787 | 863 |
| AC003597 | CA004450 | 646 | 837 | CS004395 | 801 | 873 |
| AC003598 | CA004451 | 647 | 836 | CS004393 | 800 | 872 |
| AC003601 | CA004452 | 648 | 837 | CS004395 | 801 | 873 |
| AC003602 | CA004453 | 649 | 836 | CS004393 | 800 | 872 |
| AC003659 | CA004518 | 650 | 838 | CS004397 | 802 | 874 |
| AC003660 | CA004519 | 651 | 837 | CS004395 | 801 | 873 |
| AC003843 | CA004288 | 642 | 825 | CS004174 | 793 | 866 |
| AC003924 | CA004834 | 655 | 836 | CS004393 | 800 | 872 |
| AC004077 | CA005033 | 657 | 836 | CS004393 | 800 | 872 |
| AC004078 | CA005034 | 658 | 901 | CS004393 | 800 | 872 |
| AC004079 | CA005037 | 660 | 839 | CS005036 | 804 | 889 |
| AC004082 | CA005032 | 656 | 830 | CS003906 | 788 | 864 |
| AC004083 | CA005035 | 659 | 826 | CS003904 | 787 | 863 |
| AC004358 | CA005404 | 662 | 840 | CS005405 | 805 | 875 |
| AC004361 | CA005404 | 662 | 840 | CS003906 | 788 | 864 |
| AC004363 | CA005407 | 663 | 841 | CS003906 | 788 | 864 |
| AC004373 | CA005413 | 667 | 902 | CS003906 | 788 | 864 |
| AC004374 | CA005414 | 668 | 903 | CS003906 | 788 | 864 |
| AC004375 | CA005415 | 669 | 830 | CS003906 | 788 | 864 |
| AC004376 | CA005410 | 664 | 830 | CS003906 | 788 | 864 |
| AC004377 | CA005411 | 665 | 830 | CS003906 | 788 | 864 |
| AC004378 | CA005412 | 666 | 830 | CS003906 | 788 | 864 |
| AC004565 | CA005630 | 670 | 842 | CS005657 | 806 | 876 |
| AC004566 | CA005632 | 671 | 843 | CS005658 | 807 | 877 |
| AC004567 | CA005634 | 672 | 844 | CS005659 | 808 | 878 |
| AC004568 | CA005636 | 673 | 845 | CS005660 | 809 | 879 |
| AC004569 | CA005638 | 674 | 846 | CS005661 | 810 | 880 |
| AC004570 | CA005640 | 675 | 847 | CS005662 | 811 | 881 |
| AC004571 | CA005642 | 676 | 848 | CS005663 | 812 | 882 |
| AC004572 | CA005644 | 677 | 849 | CS005664 | 813 | 883 |
| AC004573 | CA005646 | 678 | 850 | CS005665 | 814 | 884 |
| AC004574 | CA005648 | 679 | 851 | CS005666 | 815 | 885 |
| AC004644 | CA005746 | 680 | 852 | CS004393 | 800 | 872 |
| AC004645 | CA005746 | 680 | 852 | CS005747 | 816 | 890 |
| AC004646 | CA005749 | 681 | 853 | CS005748 | 817 | 891 |
| AC004647 | CA005750 | 682 | 904 | CS004393 | 800 | 872 |
| AC004648 | CA005751 | 683 | 905 | CS004393 | 800 | 872 |
| AC004649 | CA005752 | 684 | 906 | CS004393 | 800 | 872 |
| AC004816 | CA005749 | 681 | 853 | CS004393 | 800 | 872 |
| AC004817 | CA005958 | 685 | 854 | CS005957 | 818 | 892 |
| AC004818 | CA005959 | 686 | 855 | CS004393 | 800 | 872 |
| AC004819 | CA005959 | 686 | 855 | CS005957 | 818 | 892 |
| AC004820 | CA005958 | 685 | 854 | CS005960 | 819 | 893 |
| AC004821 | CA005958 | 685 | 854 | CS004393 | 800 | 872 |
| AC004837 | CA005976 | 687 | 855 | CS004393 | 800 | 872 |
| AC004838 | CA005977 | 688 | 836 | CS004393 | 800 | 872 |
| AC004908 | CA006068 | 689 | 853 | CS004393 | 800 | 872 |
| AC004915 | CA006074 | 690 | 854 | CS004393 | 800 | 872 |
| AC004916 | CA006075 | 691 | 856 | CS004395 | 801 | 873 |
| AC004917 | CA006076 | 692 | 837 | CS004395 | 801 | 873 |
| AC005191 | CA006343 | 693 | 852 | CS005747 | 816 | 890 |
| AC005192 | CA006345 | 694 | 857 | CS006344 | 820 | 894 |
| AC005193 | CA006347 | 695 | 858 | CS006346 | 821 | 895 |
| AC005195 | CA005407 | 663 | 841 | CS006349 | 822 | 896 |
| AC005196 | CA006350 | 696 | 841 | CS006349 | 822 | 896 |
| AC005206 | CA005958 | 685 | 854 | CS005748 | 817 | 891 |
| AC005233 | CA006068 | 689 | 853 | CS005748 | 817 | 891 |
| AC005236 | CA006383 | 697 | 859 | CS004397 | 802 | 874 |
| AC005249 | CA006350 | 696 | 841 | CS003906 | 788 | 864 |
| AC005944 | CA005056 | 661 | 840 | CS003906 | 788 | 864 |
| AC005945 | CA004538 | 652 | 830 | CS003906 | 788 | 864 |
| AC005991 | CA006074 | 690 | 854 | CS005748 | 817 | 891 |

TABLE 9
Conjugate Duplex ID Numbers Referencing
Position Targeted On TSLP (TSLP) Gene

| | | | Targeted TSLP |
|---|---|---|---|
| Conjugated | | | Gene Position |
| Duplex | AS ID | SS ID | (of SEQ ID NO: 1) |
| AC001714 | AM14179-AS | CS001922 | N/A |
| AC002515 | AM16334-AS | CS003220 | N/A |
| AC003096 | AM19258-AS | CS003898 | 398 |
| AC003097 | AM19260-AS | CS003900 | 410 |
| AC003098 | AM19262-AS | CS003902 | 515 |
| AC003099 | AM19264-AS | CS003904 | 570 |
| AC003100 | AM19266-AS | CS003906 | 571 |
| AC003101 | AM19268-AS | CS003908 | 568 |
| AC003102 | AM18311-AS | CS003904 | 570 |
| AC003128 | AM19335-AS | CS003954 | 520 |
| AC003129 | AM19337-AS | CS003956 | 413 |
| AC003130 | AM19339-AS | CS003958 | 406 |
| AC003252 | AM18285-AS | CS003954 | 520 |
| AC003253 | AM19685-AS | CS003954 | 520 |
| AC003339 | AM19938-AS | CS003954 | 520 |
| AC003340 | AM19939-AS | CS003954 | 520 |
| AC003341 | AM19335-AS | CS004174 | 520 |
| AC003342 | AM19941-AS | CS003954 | 520 |
| AC003343 | AM19942-AS | CS003954 | 520 |
| AC003344 | AM19943-AS | CS003954 | 520 |
| AC003345 | AM19944-AS | CS003954 | 520 |
| AC003346 | AM19945-AS | CS003954 | 520 |
| AC003347 | AM19946-AS | CS003954 | 520 |
| AC003371 | AM19947-AS | CS003906 | 571 |
| AC003372 | AM19266-AS | CS004205 | 571 |
| AC003373 | AM19949-AS | CS003906 | 571 |
| AC003374 | AM19950-AS | CS003906 | 571 |
| AC003375 | AM19951-AS | CS003906 | 571 |
| AC003376 | AM19952-AS | CS003906 | 571 |
| AC003377 | AM19953-AS | CS003906 | 571 |
| AC003378 | AM19954-AS | CS003906 | 571 |
| AC003379 | AM19955-AS | CS003906 | 571 |
| AC003415 | AM20176-AS | CS004244 | 417 |
| AC003416 | AM20176-AS | CS004246 | 417 |
| AC003446 | AM19941-AS | CS004174 | 520 |
| AC003447 | AM19941-AS | CS004280 | 520 |
| AC003448 | AM20299-AS | CS003954 | 520 |
| AC003449 | AM20300-AS | CS003954 | 520 |
| AC003450 | AM20314-AS | CS003954 | 520 |
| AC003451 | AM20315-AS | CS003954 | 520 |
| AC003452 | AM20315-AS | CS004280 | 520 |
| AC003453 | AM20303-AS | CS003954 | 520 |
| AC003454 | AM20308-AS | CS003954 | 520 |
| AC003455 | AM20309-AS | CS003954 | 520 |
| AC003456 | AM20310-AS | CS003954 | 520 |
| AC003457 | AM20304-AS | CS003954 | 520 |
| AC003458 | AM20305-AS | CS003954 | 520 |
| AC003459 | AM20307-AS | CS004291 | 520 |
| AC003511 | AM20487-AS | CS003904 | 570 |
| AC003537 | AM20488-AS | CS003906 | 571 |
| AC003538 | AM20489-AS | CS003906 | 571 |
| AC003539 | AM20490-AS | CS003906 | 571 |
| AC003540 | AM20491-AS | CS003954 | 520 |
| AC003541 | AM19947-AS | CS004392 | 571 |
| AC003542 | AM19947-AS | CS004205 | 571 |
| AC003543 | AM20534-AS | CS004393 | 571 |
| AC003544 | AM20536-AS | CS004395 | 571 |
| AC003545 | AM20538-AS | CS004397 | 571 |
| AC003546 | AM20539-AS | CS004397 | 571 |
| AC003547 | AM20540-AS | CS004397 | 571 |
| AC003567 | CA004416 | CS003904 | 570 |
| AC003568 | CA004416 | CS004420 | 570 |
| AC003569 | CA004417 | CS003904 | 570 |
| AC003570 | CA004417 | CS004420 | 570 |
| AC003571 | CA004418 | CS004420 | 570 |
| AC003572 | CA004418 | CS003904 | 570 |
| AC003597 | CA004450 | CS004395 | 571 |
| AC003598 | CA004451 | CS004393 | 571 |
| AC003601 | CA004452 | CS004395 | 571 |
| AC003602 | CA004453 | CS004393 | 571 |
| AC003659 | CA004518 | CS004397 | 571 |
| AC003660 | CA004519 | CS004395 | 571 |
| AC003843 | CA004288 | CS004174 | 520 |
| AC003924 | CA004834 | CS004393 | 571 |
| AC004077 | CA005033 | CS004393 | 571 |
| AC004078 | CA005034 | CS004393 | 571 |
| AC004079 | CA005037 | CS005036 | 570 |
| AC004082 | CA005032 | CS003906 | 571 |
| AC004083 | CA005035 | CS003904 | 570 |
| AC004358 | CA005404 | CS005405 | 571 |
| AC004361 | CA005404 | CS003906 | 571 |
| AC004363 | CA005407 | CS003906 | 571 |
| AC004373 | CA005413 | CS003906 | 571 |
| AC004374 | CA005414 | CS003906 | 571 |
| AC004375 | CA005415 | CS003906 | 571 |
| AC004376 | CA005410 | CS003906 | 571 |
| AC004377 | CA005411 | CS003906 | 571 |
| AC004378 | CA005412 | CS003906 | 571 |
| AC004565 | CA005630 | CS005657 | 485 |
| AC004566 | CA005632 | CS005658 | 626 |
| AC004567 | CA005634 | CS005659 | 719 |
| AC004568 | CA005636 | CS005660 | 773 |
| AC004569 | CA005638 | CS005661 | 836 |
| AC004570 | CA005640 | CS005662 | 863 |
| AC004571 | CA005642 | CS005663 | 992 |
| AC004572 | CA005644 | CS005664 | 1021 |
| AC004573 | CA005646 | CS005665 | 1040 |
| AC004574 | CA005648 | CS005666 | 1218 |
| AC004644 | CA005746 | CS004393 | 571 |
| AC004645 | CA005746 | CS005747 | 571 |
| AC004646 | CA005749 | CS005748 | 571 |
| AC004647 | CA005750 | CS004393 | 571 |
| AC004648 | CA005751 | CS004393 | 571 |
| AC004649 | CA005752 | CS004393 | 571 |
| AC004816 | CA005749 | CS004393 | 571 |
| AC004817 | CA005958 | CS005957 | 571 |
| AC004818 | CA005959 | CS004393 | 571 |
| AC004819 | CA005959 | CS005957 | 571 |
| AC004820 | CA005958 | CS005960 | 571 |
| AC004821 | CA005958 | CS004393 | 571 |
| AC004837 | CA005976 | CS004393 | 571 |
| AC004838 | CA005977 | CS004393 | 571 |
| AC004908 | CA006068 | CS004393 | 571 |
| AC004915 | CA006074 | CS004393 | 571 |
| AC004916 | CA006075 | CS004395 | 571 |
| AC004917 | CA006076 | CS004395 | 571 |
| AC005191 | CA006343 | CS005747 | 571 |
| AC005192 | CA006345 | CS006344 | 571 |
| AC005193 | CA006347 | CS006346 | 571 |
| AC005195 | CA005407 | CS006349 | 571 |
| AC005196 | CA006350 | CS006349 | 571 |
| AC005206 | CA005958 | CS005748 | 571 |
| AC005233 | CA006068 | CS005748 | 571 |
| AC005236 | CA006383 | CS004397 | 571 |
| AC005249 | CA006350 | CS003906 | 571 |
| AC005944 | CA005056 | CS003906 | 571 |
| AC005945 | CA004538 | CS003906 | 571 |
| AC005991 | CA006074 | CS005748 | 571 |

[0128] Duplex ID Nos. AC001714 and AC002515 include a rat-specific sequence designed to target the rat TSLP transcript (NCBI GenBank XM_008772052.2) and does not have homology with the human TSLP gene.

TABLE 10
Conjugate ID Numbers With Chemically Modified Antisense and Sense Strands (including Linkers and Conjugates)

| ACID | Sense Strand (Fully Modified with Conjugated Targeting | SEQ | | SEQ |
|---|---|---|---|---|
| Number | Ligand) (5′→3′) | ID NO: | Antisense Strand (5′→3′) | ID NO: |
| AC001714 | Tri-SM6.1-avb6-(TA14)-gsa_2NaucaaaCfCfUfcacaaauucus(invAb) | 782 | cPrpasGfsasAfuUfuGfuGfaGfgUfuUfgAfuUfsc | 587 |
| AC002515 | Tri-SM6.1-avb6-(TA14)-csugaaacuGfAfGfagaaaugguas(invAb) | 783 | cPrpusAfscsCfaUfuucucUfcAfgUfuUfcasg | 588 |
| AC003096 | Tri-SM6.1-avb6-(TA14)-csa_2NuugccuUfAfCfugaaauccaas(invAb) | 784 | cPrpusUfsgsGfaUfuUfcAfgUfaAfgGfcAfaUfsg | 591 |
| AC003097 | Tri-SM6.1-avb6-(TA14)-gsa_2NaauccaGfAfGfccuaaccuuas(invAb) | 785 | cPrpusAfsasGfgUfuAfgGfcUfcUfgGfaUfuUfsc | 592 |
| AC003098 | Tri-SM6.1-avb6-(TA14)-gsauucggaAfAfCfucagauaaa_2Nus(invAb) | 786 | cPrpasUfsusUfaUfcUfgAfgUfuUfcCfgAfaUfsc | 593 |
| AC003099 | Tri-SM6.1-avb6-(TA14)-a_2NsagucacaAfCfCfaauaaauguas(invAb) | 787 | cPrpusAfscsAfuUfuAfuUfgGfuUfgUfgAfcUfsu | 594 |
| AC003100 | Tri-SM6.1-avb6-(TA14)-asgucacaaCfCfAfauaaaugucus(invAb) | 788 | cPrpasGfsasCfaUfuUfaUfuGfgUfuGfuGfaCfsu | 595 |
| AC003101 | Tri-SM6.1-avb6-(TA14)-gsaaagucaCfAfAfccaauaaa_2Nuas(invAb) | 789 | cPrpusAfsusUfuAfuUfgGfuUfgUfgAfcUfuUfsc | 596 |
| AC003102 | Tri-SM6.1-avb6-(TA14)-a_2NsagucacaAfCfCfaauaaauguas(invAb) | 787 | usAfscsAfuUfuAfuUfgGfuUfgUfgAfcUfsu | 590 |
| AC003128 | Tri-SM6.1-avb6-(TA14)-gsgaaacucAfGfAfuaaaugcuaas(invAb) | 790 | cPrpusUfsasGfcAfuUfuAfuCfuGfaGfuUfuCfsc | 597 |
| AC003129 | Tri-SM6.1-avb6-(TA14)-asuccagagCfCfUfaaccuucaaus(invAb) | 791 | cPrpasUfsusGfaAfgGfuUfaGfgCfuCfuGfgAfsu | 598 |
| AC003130 | Tri-SM6.1-avb6-(TA14)-usa_2NcugaaaUfCfCfagagccuaaas(invAb) | 792 | cPrpusUfsusAfgGfcUfcUfgGfaUfuUfcAfgUfsa | 599 |
| AC003252 | Tri-SM6.1-avb6-(TA14)-gsgaaacucAfGfAfuaaaugcuaas(invAb) | 790 | usUfsasGfcAfuUfuAfuCfuGfaGfuUfuCfsc | 589 |
| AC003253 | Tri-SM6.1-avb6-(TA14)-gsgaaacucAfGfAfuaaaugcuaas(invAb) | 790 | cPrpusUfsaGfcAfuUfuAfuCfuGfaGfuUfuCfsc | 600 |
| AC003339 | Tri-SM6.1-avb6-(TA14)-gsgaaacucAfGfAfuaaaugcuaas(invAb) | 790 | cPrpuUfaGfcAfuUfuAfuCfuGfaGfuUfuCfsc | 601 |
| AC003340 | Tri-SM6.1-avb6-(TA14)-gsgaaacucAfGfAfuaaaugcuaas(invAb) | 790 | cPrpusUfsagcauuuauCfuGfaGfuuucsc | 602 |
| AC003341 | Tri-SM6.1-avb6-(TA14)-gsgaaacucAfgAfuAfaaugcuaas(invAb) | 793 | cPrpusUfsasGfcAfuUfuAfuCfuGfaGfuUfuCfsc | 597 |
| AC003342 | Tri-SM6.1-avb6-(TA14)-gsgaaacucAfGfAfuaaaugcuaas(invAb) | 790 | cPrpusUfsagcauuUfauCfuGfaGfuuucsc | 603 |
| AC003343 | Tri-SM6.1-avb6-(TA14)-gsgaaacucAfGfAfuaaaugcuaas(invAb) | 790 | cPrpusUfsagCfauuuauCfuGfaGfuuucsc | 604 |
| AC003344 | Tri-SM6.1-avb6-(TA14)-gsgaaacucAfGfAfuaaaugcuaas(invAb) | 790 | cPrpusUfsagcaUfuuauCfuGfaGfuuucsc | 605 |
| AC003345 | Tri-SM6.1-avb6-(TA14)-gsgaaacucAfGfAfuaaaugcuaas(invAb) | 790 | cPrpusUfsagcauUfuauCfuGfaGfuuucsc | 606 |
| AC003346 | Tri-SM6.1-avb6-(TA14)-gsgaaacucAfGfAfuaaaugcuaas(invAb) | 790 | cPrpusUfsaGfcAfUfuuauCfuGfaGfuuucsc | 607 |
| AC003347 | Tri-SM6.1-avb6-(TA14)-gsgaaacucAfGfAfuaaaugcuaas(invAb) | 790 | cPrpusdTsagcauuuauCfuGfaGfuuucsc | 608 |
| AC003371 | Tri-SM6.1-avb6-(TA14)-asgucacaaCfCfAfauaaaugucus(invAb) | 788 | cPrpasGfsaCfaUfuUfaUfuGfgUfuGfuGfaCfsu | 609 |
| AC003372 | Tri-SM6.1-avb6-(TA14)-asgucacaaCfcAfaUfaaaugucus(invAb) | 794 | cPrpasGfsasCfaUfuUfaUfuGfgUfuGfuGfaCfsu | 595 |
| AC003373 | Tri-SM6.1-avb6-(TA14)-asgucacaaCfCfAfauaaaugucus(invAb) | 788 | cPrpasGfsacauuuauuGfgUfuGfugacsu | 610 |
| AC003374 | Tri-SM6.1-avb6-(TA14)-asgucacaaCfCfAfauaaaugucus(invAb) | 788 | cPrpasGfsacauuuaUfuGfgUfuGfugacsu | 611 |
| AC003375 | Tri-SM6.1-avb6-(TA14)-asgucacaaCfCfAfauaaaugucus(invAb) | 788 | cPrpasGfsacauuuAfuuGfgUfuGfugacsu | 612 |
| AC003376 | Tri-SM6.1-avb6-(TA14)-asgucacaaCfCfAfauaaaugucus(invAb) | 788 | cPrpasGfsacauUfuauuGfgUfuGfugacsu | 613 |
| AC003377 | Tri-SM6.1-avb6-(TA14)-asgucacaaCfCfAfauaaaugucus(invAb) | 788 | cPrpasGfsacAfUfuuAfuuGfgUfuGfugacsu | 614 |
| AC003378 | Tri-SM6.1-avb6-(TA14)-asgucacaaCfCfAfauaaaugucus(invAb) | 788 | cPrpasGfsaCfaUfUfuauuGfgUfuGfugacsu | 615 |
| AC003379 | Tri-SM6.1-avb6-(TA14)-asgucacaaCfCfAfauaaaugucus(invAb) | 788 | cPrpaGfacauuuaUfuGfgUfuGfugacsu | 616 |
| AC003415 | Tri-SM6.1-avb6-(TA14)-asgagccuaAfCfCfuucaaucucas(invAb) | 795 | cPrpusGfsgsGfaUfuGfaAfgGfuUfaGfgCfuCfsu | 617 |
| AC003416 | Tri-SM6.1-avb6-(TA14)-asgagccuaAfCfCfuucaaucccas(invAb) | 796 | cPrpusGfsgsGfaUfuGfaAfgGfuUfaGfgCfuCfsu | 617 |
| AC003446 | Tri-SM6.1-avb6-(TA14)-gsgaaacucAfgAfuAfaaugcuaas(invAb) | 793 | cPrpusUfsagcauuUfauCfuGfaGfuuucsc | 603 |
| AC003447 | Tri-SM6.1-avb6-(TA14)-gsgaaacucdAgdAudAaaugcuaas(invAb) | 797 | cPrpusUfsagcauuUfauCfuGfaGfuuucsc | 603 |
| AC003448 | Tri-SM6.1-avb6-(TA14)-gsgaaacucAfGfAfuaaaugcuaas(invAb) | 790 | cPrpusUfsagdCauuuauCfuGfaguuucsc | 618 |
| AC003449 | Tri-SM6.1-avb6-(TA14)-gsgaaacucAfGfAfuaaaugcuaas(invAb) | 790 | cPrpusUfsagcauudTauCfuGfaguuucsc | 619 |
| AC003450 | Tri-SM6.1-avb6-(TA14)-gsgaaacucAfGfAfuaaaugcuaas(invAb) | 790 | cPrpusdTsagcauudTauCfuGfaguuucsc | 629 |
| AC003451 | Tri-SM6.1-avb6-(TA14)-gsgaaacucAfGfAfuaaaugcuaas(invAb) | 790 | cPrpusdTsagcauudTauCfuGfadGuuucsc | 630 |
| AC003452 | Tri-SM6.1-avb6-(TA14)-gsgaaacucdAgdAudAaaugcuaas(invAb) | 797 | cPrpusdTsagcauudTauCfuGfadGuuucsc | 630 |
| AC003453 | Tri-SM6.1-avb6-(TA14)-gsgaaacucAfGfAfuaaaugcuaas(invAb) | 790 | cPrpusUfsagcauuuauCfuGfaguuucsc | 622 |
| AC003454 | Tri-SM6.1-avb6-(TA14)-gsgaaacucAfGfAfuaaaugcuaas(invAb) | 790 | cPrpusUfsagcauUfUfauCfuGfaguuucsc | 626 |
| AC003455 | Tri-SM6.1-avb6-(TA14)-gsgaaacucAfGfAfuaaaugcuaas(invAb) | 790 | cPrpusUfsagcauuUfauCfuGfaguuucsc | 627 |
| AC003456 | Tri-SM6.1-avb6-(TA14)-gsgaaacucAfGfAfuaaaugcuaas(invAb) | 790 | cPrpusUfsagCfauuUfauCfuGfaguuucsc | 628 |
| AC003457 | Tri-SM6.1-avb6-(TA14)-gsgaaacucAfGfAfuaaaugcuaas(invAb) | 790 | cPrpusUfsagcaTGNAuUfauCfuGfaGfuuucsc | 623 |
| AC003458 | Tri-SM6.1-avb6-(TA14)-gsgaaacucAfGfAfuaaaugcuaas(invAb) | 790 | cPrpusUfsagcaU_{UNA}uUfauCfuGfaGfuuucsc | 624 |
| AC003459 | Tri-SM6.1-avb6-(TA14)-gsa_2NacucAfGfAfuaaaugcuaas(invAb) | 798 | cPrpusUfsagcauUfuauCfuGfaGfuusc | 625 |
| AC003511 | Tri-SM6.1-avb6-(TA14)-a_2NsagucacaAfCfCfaauaaauguas(invAb) | 787 | cPrpusAfscAfuUfuAfuUfgGfuUfgUfgAfcUfsu | 631 |
| AC003537 | Tri-SM6.1-avb6-(TA14)-asgucacaaCfCfAfauaaaugucus(invAb) | 788 | cPrpasGfsacAfUfuuauuGfgUfuGfugacsu | 632 |
| AC003538 | Tri-SM6.1-avb6-(TA14)-asgucacaaCfCfAfauaaaugucus(invAb) | 788 | cPrpasGfsacAfUfuuauuGfgUfugugacsu | 633 |
| AC003539 | Tri-SM6.1-avb6-(TA14)-asgucacaaCfCfAfauaaaugucus(invAb) | 788 | cPrpasGfsacAfuuuauuGfgUfuGfugacsu | 634 |
| AC003540 | Tri-SM6.1-avb6-(TA14)-gsgaaacucAfGfAfuaaaugcuaas(invAb) | 790 | cPrpusUfsagCfAfuuUfauCfuGfaGfuuucsc | 635 |
| AC003541 | Tri-SM6.1-avb6-(TA14)-asgucacAfaCfcAfauaaaugucus(invAb) | 799 | cPrpasGfsaCfaUfuUfaUfuGfgUfuGfuGfaCfsu | 609 |
| AC003542 | Tri-SM6.1-avb6-(TA14)-asgucacaaCfcAfaUfaaaugucus(invAb) | 794 | cPrpasGfsaCfaUfuUfaUfuGfgUfuGfuGfaCfsu | 609 |
| AC003543 | Tri-SM6.1-avb6-(TA14)-gsgucacaaCfCfAfauaaaugucus(invAb) | 800 | cPrpasGfsaCfaUfuUfaUfuGfgUfuGfuGfaCfsc | 636 |
| AC003544 | Tri-SM6.1-avb6-(TA14)-gsgucacaaCfCfAfauaaaugucas(invAb) | 801 | cPrpusGfsaCfaUfuUfaUfuGfgUfuGfuGfaCfsc | 637 |
| AC003545 | Tri-SM6.1-avb6-(TA14)-asgucacaaCfCfAfauaaaugucas(invAb) | 802 | cPrpusGfsaCfaUfuUfaUfuGfgUfuGfuGfaCfsu | 638 |
| AC003546 | Tri-SM6.1-avb6-(TA14)-asgucacaaCfCfAfauaaaugucas(invAb) | 802 | cPrpusGfsacauuuaUfuGfgUfuGfugacsu | 639 |
| AC003547 | Tri-SM6.1-avb6-(TA14)-asgucacaaCfCfAfauaaaugucas(invAb) | 802 | cPrpusGfsacauUfuauuGfgUfuGfugacsu | 640 |
| AC003567 | Tri-SM6.1-avb6-(TA14)-a_2NsagucacaAfCfCfaauaaauguas(invAb) | 787 | cPrpusAfscauuuauUfgGfuUfgUfgacusu | 643 |
| AC003568 | Tri-SM6.1-avb6-(TA14)-a_2NsagucacaAfcCfaAfuaaauguas(invAb) | 803 | cPrpusAfscauuuauUfgGfuUfgUfgacusu | 643 |
| AC003569 | Tri-SM6.1-avb6-(TA14)-a_2NsagucacaAfCfCfaauaaauguas(invAb) | 787 | cPrpusAfscaUfUfuaUfugGfuUfgUfgacusu | 644 |
| AC003570 | Tri-SM6.1-avb6-(TA14)-a_2NsagucacaAfcCfaAfuaaauguas(invAb) | 803 | cPrpusAfscaUfUfuaUfugGfuUfgUfgacusu | 644 |
| AC003571 | Tri-SM6.1-avb6-(TA14)-a_2NsagucacaAfcCfaAfuaaauguas(invAb) | 803 | cPrpusAfscauuUfauugGfuUfgUfgacusu | 645 |
| AC003572 | Tri-SM6.1-avb6-(TA14)-a_2NsagucacaAfCfCfaauaaauguas(invAb) | 787 | cPrpusAfscauuUfauugGfuUfgUfgacusu | 645 |
| AC003597 | Tri-SM6.1-avb6-(TA14)-gsgucacaaCfCfAfauaaaugucas(invAb) | 801 | cPrpusGfsacauUfuauuGfgUfuGfugacsc | 646 |
| AC003598 | Tri-SM6.1-avb6-(TA14)-gsgucacaaCfCfAfauaaaugucus(invAb) | 800 | cPrpasGfsacauUfuauuGfgUfuGfugacsc | 647 |
| AC003601 | Tri-SM6.1-avb6-(TA14)-gsgucacaaCfCfAfauaaaugucas(invAb) | 801 | cPrpusGfsacauuuaUfuGfgUfuGfugacsc | 648 |
| AC003602 | Tri-SM6.1-avb6-(TA14)-gsgucacaaCfCfAfauaaaugucus(invAb) | 800 | cPrpasGfsacauuuaUfuGfgUfuGfugacsc | 649 |
| AC003659 | Tri-SM6.1-avb6-(TA14)-asgucacaaCfCfAfauaaaugucas(invAb) | 802 | cPrpuGfacauuuaUfuGfgUfuGfugacsu | 650 |
| AC003660 | Tri-SM6.1-avb6-(TA14)-gsgucacaaCfCfAfauaaaugucas(invAb) | 801 | cPrpuGfacauuuaUfuGfgUfuGfugacsc | 651 |
| AC003843 | Tri-SM6.1-avb6-(TA14)-gsgaaacucAfgAfuAfaaugcuaas(invAb) | 793 | cPrpusUfsagCfauuUfauCfuGfaguuucsc | 642 |
| AC003924 | Tri-SM6.1-avb6-(TA14)-gsgucacaaCfCfAfauaaaugucus(invAb) | 800 | cPrpasGfsacauuuAfuuGfgUfuGfugacsc | 655 |
| AC004077 | Tri-SM6.1-avb6-(TA14)-gsgucacaaCfCfAfauaaaugucus(invAb) | 800 | cPrpasGfsacauU_{UNA}uaUfuGfgUfuGfugacsc | 657 |
| AC004078 | Tri-SM6.1-avb6-(TA14)-gsgucacaaCfCfAfauaaaugucus(invAb) | 800 | cPrpasGfsacauTGNAuaUfuGfgUfuGfugacsc | 658 |
| AC004079 | Tri-SM6.1-avb6-(TA14)-gsagucacaAfCfCfaauaaauguas(invAb) | 804 | cPrpusAfscauuU_{UNA}auUfgGfuUfgUfgacusc | 660 |
| AC004082 | Tri-SM6.1-avb6-(TA14)-asgucacaaCfCfAfauaaaugucus(invAb) | 788 | cPrpasGfsacauU_{UNA}uaUfuGfgUfuGfugacsu | 656 |
| AC004083 | Tri-SM6.1-avb6-(TA14)-a_2NsagucacaAfCfCfaauaaauguas(invAb) | 787 | cPrpusAfscauuU_{UNA}auUfgGfuUfgUfgacusu | 659 |
| AC004358 | Tri-SM6.1-avb6-(TA14)-asgucacaaCfCfAfauaaauguccs(invAb) | 805 | cPrpisGfsacauuuaUfuGfgUfuGfugacsu | 662 |
| AC004361 | Tri-SM6.1-avb6-(TA14)-asgucacaaCfCfAfauaaaugucus(invAb) | 788 | cPrpisGfsacauuuaUfuGfgUfuGfugacsu | 662 |
| AC004363 | Tri-SM6.1-avb6-(TA14)-asgucacaaCfCfAfauaaaugucus(invAb) | 788 | cPrpasGfsacguuuaUfuGfgUfuGfugacsu | 663 |
| AC004373 | Tri-SM6.1-avb6-(TA14)-asgucacaaCfCfAfauaaaugucus(invAb) | 788 | cPrpasGfsacaTGNAuuaUfuGfgUfuGfugacsu | 667 |
| AC004374 | Tri-SM6.1-avb6-(TA14)-asgucacaaCfCfAfauaaaugucus(invAb) | 788 | cPrpasGfsacauuTGNAaUfuGfgUfuGfugacsu | 668 |
| AC004375 | Tri-SM6.1-avb6-(TA14)-asgucacaaCfCfAfauaaaugucus(invAb) | 788 | cPrpasGfsacauuU_{UNA}aUfuGfgUfuGfugacsu | 669 |
| AC004376 | Tri-SM6.1-avb6-(TA14)-asgucacaaCfCfAfauaaaugucus(invAb) | 788 | cPrpasGfsacauuuaUfuGfgUfuGfugacssu | 664 |
| AC004377 | Tri-SM6.1-avb6-(TA14)-asgucacaaCfCfAfauaaaugucus(invAb) | 788 | cPrpaGfacauuuaUfuGfgUfuGfugascsu | 665 |
| AC004378 | Tri-SM6.1-avb6-(TA14)-asgucacaaCfCfAfauaaaugucus(invAb) | 788 | cPrpaGfacauuuaUfuGfgUfuGfugacssu | 666 |
| AC004565 | Tri-SM6.1-avb6-(TA14)-asaggcugcCfUfUfagcuaucugas(invAb) | 806 | cPrpusCfsaGfaUfagcuaAfgGfcAfgCfcusu | 670 |
| AC004566 | Tri-SM6.1-avb6-(TA14)-csgcuucaaUfCfGfaccuuuacuas(invAb) | 807 | cPrpusAfsgUfaAfaggucGfaUfuGfaAfgcsg | 671 |
| AC004567 | Tri-SM6.1-avb6-(TA14)-gsa_2NaacauuAfAfCfucuaacuguas(invAb) | 808 | cPrpusAfscAfgUfuagagUfuAfaUfgUfuusc | 672 |
| AC004568 | Tri-SM6.1-avb6-(TA14)-a_2NscagaagaGfUfUfucuuaacuuas(invAb) | 809 | cPrpusAfsaGfuUfaagaaAfcUfcUfuCfugsu | 673 |
| AC004569 | Tri-SM6.1-avb6-(TA14)-gsuacuacuCfCfUfcaaauguugas(invAb) | 810 | cPrpusCfsaAfcAfuuugaGfgAfgUfaGfuasc | 674 |
| AC004570 | Tri-SM6.1-avb6-(TA14)-csuuccauaAfCfAfuugaugacuas(invAb) | 811 | cPrpusAfsgUfcAfucaauGfuUfaUfgGfaasg | 675 |
| AC004571 | Tri-SM6.1-avb6-(TA14)-gscaaugauAfGfCfaccuaaacuus(invAb) | 812 | cPrpasAfsgUfuUfaggugCfuAfuCfaUfugsc | 676 |
| AC004572 | Tri-SM6.1-avb6-(TA14)-a_2NsagacagaCfAfUfuccuucuacas(invAb) | 813 | cPrpusGfsuAfgAfaggaaUfgUfcUfgUfcusu | 677 |
| AC004573 | Tri-SM6.1-avb6-(TA14)-csa_2NuguaauGfAfCfacuucuuguas(invAb) | 814 | cPrpusAfscAfaGfaagugUfcAfuUfaCfausg | 678 |
| AC004574 | Tri-SM6.1-avb6-(TA14)-a_2NsuacaaguAfGfAfuccugagaaas(invAb) | 815 | cPrpusUfsuCfuCfaggauCfuAfcUfuGfuasu | 679 |
| AC004644 | Tri-SM6.1-avb6-(TA14)-gsgucacaaCfCfAfauaaaugucus(invAb) | 800 | cPrpasGfsacauuugUfuGfgUfuGfugacsc | 680 |
| AC004645 | Tri-SM6.1-avb6-(TA14)-gsgucacaaCfCfAfacaaaugucus(invAb) | 816 | cPrpasGfsacauuugUfuGfgUfuGfugacsc | 680 |
| AC004646 | Tri-SM6.1-avb6-(TA14)-gsgucacaaCfCfAfauaaacgucus(invAb) | 817 | cPrpasGfsacguuuaUfuGfgUfuGfugacsc | 681 |
| AC004647 | Tri-SM6.1-avb6-(TA14)-gsgucacaaCfCfAfauaaaugucus(invAb) | 800 | cPrpasGfsacguuuaUfdTGfgUfuGfugacsc | 682 |
| AC004648 | Tri-SM6.1-avb6-(TA14)-gsgucacaaCfCfAfauaaaugucus(invAb) | 800 | cPrpasGfsacauuuaUfdTGfgUfuGfugacsc | 683 |
| AC004649 | Tri-SM6.1-avb6-(TA14)-gsgucacaaCfCfAfauaaaugucus(invAb) | 800 | cPrpasGfsacauuuadTuGfgUfuGfugacsc | 684 |
| AC004816 | Tri-SM6.1-avb6-(TA14)-gsgucacaaCfCfAfauaaaugucus(invAb) | 800 | cPrpasGfsacguuuaUfuGfgUfuGfugacsc | 681 |
| AC004817 | Tri-SM6.1-avb6-(TA14)-gsgucacaaCfCfAfauaaauguccs(invAb) | 818 | cPrpisGfsacguuuaUfuGfgUfuGfugacsc | 685 |
| AC004818 | Tri-SM6.1-avb6-(TA14)-gsgucacaaCfCfAfauaaaugucus(invAb) | 800 | cPrpisGfsacauuuaUfuGfgUfuGfugacsc | 686 |
| AC004819 | Tri-SM6.1-avb6-(TA14)-gsgucacaaCfCfAfauaaauguccs(invAb) | 818 | cPrpisGfsacauuuaUfuGfgUfuGfugacsc | 686 |
| AC004820 | Tri-SM6.1-avb6-(TA14)-gsgucacaaCfCfAfauaaacguccs(invAb) | 819 | cPrpisGfsacguuuaUfuGfgUfuGfugacsc | 685 |
| AC004821 | Tri-SM6.1-avb6-(TA14)-gsgucacaaCfCfAfauaaaugucus(invAb) | 800 | cPrpisGfsacguuuaUfuGfgUfuGfugacsc | 685 |
| AC004837 | Tri-SM6.1-avb6-(TA14)-gsgucacaaCfCfAfauaaaugucus(invAb) | 800 | cPrpisGfsacauuuaUfuGfgUfuGfugacssc | 687 |
| AC004838 | Tri-SM6.1-avb6-(TA14)-gsgucacaaCfCfAfauaaaugucus(invAb) | 800 | cPrpasGfsacauuuaUfuGfgUfuGfugacssc | 688 |
| AC004908 | Tri-SM6.1-avb6-(TA14)-gsgucacaaCfCfAfauaaaugucus(invAb) | 800 | cPrpasGfsacguuuaUfuGfgUfuGfugacssc | 689 |
| AC004915 | Tri-SM6.1-avb6-(TA14)-gsgucacaaCfCfAfauaaaugucus(invAb) | 800 | cPrpisGfsacguuuaUfuGfgUfuGfugacssc | 690 |
| AC004916 | Tri-SM6.1-avb6-(TA14)-gsgucacaaCfCfAfauaaaugucas(invAb) | 801 | cPrpusGfsacguuuaUfuGfgUfuGfugacssc | 691 |
| AC004917 | Tri-SM6.1-avb6-(TA14)-gsgucacaaCfCfAfauaaaugucas(invAb) | 801 | cPrpusGfsacauuuaUfuGfgUfuGfugacssc | 692 |
| AC005191 | Tri-SM6.1-avb6-(TA14)-gsgucacaaCfCfAfacaaaugucus(invAb) | 816 | cPrpasGfsacauuugUfuGfgUfuGfugacssc | 693 |
| AC005192 | Tri-SM6.1-avb6-(TA14)-asgucacaaCfCfAfacaaaugucus(invAb) | 820 | cPrpasGfsacauuugUfuGfgUfuGfugacssu | 694 |
| AC005193 | Tri-SM6.1-avb6-(TA14)-gsgucacaaCfCfAfacaaaugucas(invAb) | 821 | cPrpusGfsacauuugUfuGfgUfuGfugacssc | 695 |
| AC005195 | Tri-SM6.1-avb6-(TA14)-asgucacaaCfCfAfauaaacgucus(invAb) | 822 | cPrpasGfsacguuuaUfuGfgUfuGfugacsu | 663 |
| AC005196 | Tri-SM6.1-avb6-(TA14)-asgucacaaCfCfAfauaaacgucus(invAb) | 822 | cPrpasGfsacguuuaUfuGfgUfuGfugacssu | 696 |
| AC005206 | Tri-SM6.1-avb6-(TA14)-gsgucacaaCfCfAfauaaacgucus(invAb) | 817 | cPrpisGfsacguuuaUfuGfgUfuGfugacsc | 685 |
| AC005233 | Tri-SM6.1-avb6-(TA14)-gsgucacaaCfCfAfauaaacgucus(invAb) | 817 | cPrpasGfsacguuuaUfuGfgUfuGfugacssc | 689 |
| AC005236 | Tri-SM6.1-avb6-(TA14)-asgucacaaCfCfAfauaaaugucas(invAb) | 802 | cPrpusGfsacguuuaUfuGfgUfuGfugacsu | 697 |
| AC005249 | Tri-SM6.1-avb6-(TA14)-asgucacaaCfCfAfauaaaugucus(invAb) | 788 | cPrpasGfsacguuuaUfuGfgUfuGfugacssu | 696 |
| AC005944 | Tri-SM6.1-avb6-(TA14)-asgucacaaCfCfAfauaaaugucus(invAb) | 788 | isGfsacauuuaUfuGfgUfuGfugacsu | 661 |
| AC005945 | Tri-SM6.1-avb6-(TA14)-asgucacaaCfCfAfauaaaugucus(invAb) | 788 | asGfsacauuuaUfuGfgUfuGfugacsu | 652 |
| AC005991 | Tri-SM6.1-avb6-(TA14)-gsgucacaaCfCfAfauaaacgucus(invAb) | 817 | cPrpisGfsacguuuaUfuGfgUfuGfugacssc | 690 |

[0129] In some embodiments, a TSLP RNAi agent is prepared or provided as a salt, mixed salt, or a free-acid. In some embodiments, a TSLP RNAi agent is prepared or provided as a pharmaceutically acceptable salt. In some embodiments, a TSLP RNAi agent is prepared or provided as a pharmaceutically acceptable sodium or potassium salt. In some embodiments, a TSLP RNAi agent is prepared or provided as a pharmaceutically acceptable sodium salt. The RNAi agents described herein, upon delivery to a cell expressing an TSLP gene, inhibit or knockdown expression of one or more TSLP genes in vivo and/or in vitro.

### Targeting Groups, Linking Groups, Pharmacokinetic/Pharmacodynamic (PK/PD) Modulators, and Delivery Vehicles

[0130] In some embodiments, a TSLP RNAi agent contains or is conjugated to one or more non-nucleotide groups including, but not limited to, a targeting group, a linking group, a pharmacokinetic/pharmacodynamic (PK/PD) modulator, a delivery polymer, or a delivery vehicle. The non-nucleotide group can enhance targeting, delivery, or attachment of the RNAi agent. The non-nucleotide group can be covalently linked to the 3′ and/or 5′ end of either the sense strand and/or the antisense strand. In some embodiments, a TSLP RNAi agent contains a non-nucleotide group linked to the 3′ and/or 5′ end of the sense strand. In some embodiments, a non-nucleotide group is linked to the 5′ end of a TSLP RNAi agent sense strand. A non-nucleotide group can be linked directly or indirectly to the RNAi agent via a linker/linking group. In some embodiments, a non-nucleotide group is linked to the RNAi agent via a labile, cleavable, or reversible bond or linker.

[0131] In some embodiments, a non-nucleotide group enhances the pharmacokinetic or biodistribution properties of an RNAi agent or conjugate to which it is attached to improve cell- or tissue-specific distribution and cell-specific uptake of the conjugate. In some embodiments, a non-nucleotide group enhances endocytosis of the RNAi agent.

[0132] Targeting groups or targeting moieties enhance the pharmacokinetic or biodistribution properties of a conjugate or RNAi agent to which they are attached to improve cell-specific (including, in some cases, organ specific) distribution and cell-specific (or organ specific) uptake of the conjugate or RNAi agent. A targeting group can be monovalent, divalent, trivalent, tetravalent, or have higher valency for the target to which it is directed. Representative targeting groups include, without limitation, compounds with affinity to cell surface molecule, cell receptor ligands, hapten, antibodies, monoclonal antibodies, antibody fragments, and antibody mimics with affinity to cell surface molecules. In some embodiments, a targeting group is linked to an RNAi agent using a linker, such as a PEG linker or one, two, or three abasic and/or ribitol (abasic ribose) residues, which in some instances can serve as linkers.

[0133] A targeting group, with or without a linker, can be attached to the 5′ or 3′ end of any of the sense and/or antisense strands disclosed in Tables 2, 3, 4, 5, 6, and 10. A linker, with or without a targeting group, can be attached to the 5′ or 3′ end of any of the sense and/or antisense strands disclosed in Tables 2, 3, 4, 5, 6, and 10.

[0134] The TSLP RNAi agents described herein can be synthesized having a reactive group, such as an amino group (also referred to herein as an amine), at the 5′-terminus and/or the 3′-terminus. The reactive group can be used subsequently to attach a targeting moiety using methods typical in the art.

[0135] For example, in some embodiments, the TSLP RNAi agents disclosed herein are synthesized having an NH₂-C₆ group at the 5′-terminus of the sense strand of the RNAi agent. The terminal amino group subsequently can be reacted to form a conjugate with, for example, a group that includes an αvβ6 integrin targeting ligand. In some embodiments, the TSLP RNAi agents disclosed herein are synthesized having one or more alkyne groups at the 5′-terminus of the sense strand of the RNAi agent. The terminal alkyne group(s) can subsequently be reacted to form a conjugate with, for example, a group that includes an αvβ6 integrin targeting ligand.

[0136] In some embodiments, a targeting group comprises an integrin targeting ligand. In some embodiments, an integrin targeting ligand is an αvβ6 integrin targeting ligand. The use of an αvβ6 integrin targeting ligand facilitates cell-specific targeting to cells having αvβ6 on its respective surface, and binding of the integrin targeting ligand can facilitate entry of the therapeutic agent, such as an RNAi agent, to which it is linked, into cells such as epithelial cells, including pulmonary epithelial cells and renal epithelial cells. Integrin targeting ligands can be monomeric or monovalent (e.g., having a single integrin targeting moiety) or multimeric or multivalent (e.g., having multiple integrin targeting moieties). The targeting group can be attached to the 3′ and/or 5′ end of the RNAi oligonucleotide using methods known in the art. The preparation of targeting groups, such as αvβ6 integrin targeting ligands, is described, for example, in International Patent Application Publication No. WO 2018/085415 and in International Patent Application Publication No. WO 2019/089765, the contents of each of which are incorporated herein in its entirety.

[0137] In some embodiments, targeting groups are linked to the TSLP RNAi agents without the use of an additional linker. In some embodiments, the targeting group is designed having a linker readily present to facilitate the linkage to a TSLP RNAi agent. In some embodiments, when two or more RNAi agents are included in a composition, the two or more RNAi agents can be linked to their respective targeting groups using the same linkers. In some embodiments, when two or more RNAi agents are included in a composition, the two or more RNAi agents are linked to their respective targeting groups using different linkers.

[0138] In some embodiments, a linking group is conjugated to the RNAi agent. The linking group facilitates covalent linkage of the agent to a targeting group, pharmacokinetic modulator, delivery polymer, or delivery vehicle. The linking group can be linked to the 3′ and/or the 5′ end of the RNAi agent sense strand or antisense strand. In some embodiments, the linking group is linked to the RNAi agent sense strand. In some embodiments, the linking group is conjugated to the 5′ or 3′ end of an RNAi agent sense strand. In some embodiments, a linking group is conjugated to the 5′ end of an RNAi agent sense strand. Examples of linking groups, include but are not limited to: C6-SS-C6, 6-SS-6, reactive groups such a primary amines (e.g., NH2-C6) and alkynes, alkyl groups, abasic residues/nucleotides, amino acids, tri-alkyne functionalized groups, ribitol, and/or PEG groups. Examples of certain linking groups are provided in Table 11.

[0139] A linker or linking group is a connection between two atoms that links one chemical group (such as an RNAi agent) or segment of interest to another chemical group (such as a targeting group, pharmacokinetic modulator, or delivery polymer) or segment of interest via one or more covalent bonds. A labile linkage contains a labile bond. A linkage can optionally include a spacer that increases the distance between the two joined atoms. A spacer may further add flexibility and/or length to the linkage. Spacers include, but are not be limited to, alkyl groups, alkenyl groups, alkynyl groups, aryl groups, aralkyl groups, aralkenyl groups, and aralkynyl groups; each of which can contain one or more heteroatoms, heterocycles, amino acids, nucleotides, and saccharides. Spacer groups are well known in the art and the preceding list is not meant to limit the scope of the description. In some embodiments, a TSLP RNAi agent is conjugated to a polyethylene glycol (PEG) moiety, or to a hydrophobic group having 12 or more carbon atoms, such as a cholesterol or palmitoyl group.

[0140] In some embodiments, a TSLP RNAi agent is linked to one or more pharmacokinetic/pharmacodynamic (PK/PD) modulators. PK/PD modulators can increase circulation time of the conjugated drug and/or increase the activity of the RNAi agent through improved cell receptor binding, improved cellular uptake, and/or other means. Various PK/PD modulators suitable for use with RNAi agents are known in the art. In some embodiments, the PK/PD modulatory can be cholesterol or cholesteryl derivatives, or in some circumstances a PK/PD modulator can be comprised of alkyl groups, alkenyl groups, alkynyl groups, aryl groups, aralkyl groups, aralkenyl groups, or aralkynyl groups, each of which may be linear, branched, cyclic, and/or substituted or unsubstituted. In some embodiments, the location of attachment for these moieties is at the 5′ or 3′ end of the sense strand, at the 2′ position of the ribose ring of any given nucleotide of the sense strand, and/or attached to the phosphate or phosphorothioate backbone at any position of the sense strand.

[0141] Any of the TSLP RNAi agent nucleotide sequences listed in Tables 2, 3, 4, 5, 6, and 10, whether modified or unmodified, can contain 3′ and/or 5′ targeting group(s), linking group(s), and/or PK/PD modulator(s). Any of the TSLP RNAi agent sequences listed in Tables 3, 4, 5, 6, and 10, or are otherwise described herein, which contain a 3′ or 5′ targeting group, linking group, and/or PK/PD modulator can alternatively contain no 3′ or 5′ targeting group, linking group, or PK/PD modulator, or can contain a different 3′ or 5′ targeting group, linking group, or pharmacokinetic modulator including, but not limited to, those depicted in Table 11. Any of the TSLP RNAi agent duplexes listed in Tables 7A, 7B, 8, 9 and 10, whether modified or unmodified, can further comprise a targeting group or linking group, including, but not limited to, those depicted in Table 11, and the targeting group or linking group can be attached to the 3′ or 5′ terminus of either the sense strand or the antisense strand of the TSLP RNAi agent duplex.

[0142] Examples of certain modified nucleotides, capping moieties, and linking groups are provided in Table 11.

TABLE 11
Structures Representing Various Modified Nucleotides, Capping Moieties, and
Linking Groups (wherein [symbol] indicates the point of connection)

[chemical structure]

[chemical structure]

[chemical structure]

[chemical structure]

[chemical structure]

[chemical structure]

[chemical structure]

[chemical structure]

When positioned internally:

[chemical structure]

[chemical structure]

When positioned at the 3′ terminal end:

[chemical structure]

When positioned at the 3′ terminal end:

[chemical structure]

When positioned internally:

[chemical structure]

When position at the 3′ terminal end:

[chemical structure]

(6-SS-6)
When positioned internally:

[chemical structure]

[chemical structure]

[chemical structure]

[chemical structure]

[chemical structure]

[chemical structure]

[chemical structure]

[chemical structure]

[chemical structure]

[chemical structure]

[chemical structure]

[chemical structure]

[chemical structure]

[chemical structure]

[0143] Alternatively, other linking groups known in the art may be used. In many instances, linking groups can be commercially acquired or alternatively, are incorporated into commercially available nucleotide phosphoramidites. (See. e.g., International Patent Application Publication No. WO 2019/161213, which is incorporated herein by reference in its entirety).

[0144] In some embodiments, a TSLP RNAi agent is delivered without being conjugated to a targeting ligand or pharmacokinetic/pharmacodynamic (PK/PD) modulator (referred to as being “naked” or a “naked RNAi agent”).

[0145] In some embodiments, a TSLP RNAi agent is conjugated to a targeting group, a linking group, a PK modulator, and/or another non-nucleotide group to facilitate delivery of the TSLP RNAi agent to the cell or tissue of choice, for example, to an epithelial cell in vivo. In some embodiments, a TSLP RNAi agent is conjugated to a targeting group wherein the targeting group includes an integrin targeting ligand. In some embodiments, the integrin targeting ligand is an αvβ6 integrin targeting ligand. In some embodiments, a targeting group includes one or more αvβ6 integrin targeting ligands.

[0146] In some embodiments, a delivery vehicle may be used to deliver an RNAi agent to a cell or tissue. A delivery vehicle is a compound that improves delivery of the RNAi agent to a cell or tissue. A delivery vehicle can include, or consist of, but is not limited to: a polymer, such as an amphipathic polymer, a membrane active polymer, a peptide, a melittin peptide, a melittin-like peptide (MLP), a lipid, a reversibly modified polymer or peptide, or a reversibly modified membrane active polyamine.

[0147] In some embodiments, the RNAi agents can be combined with lipids, nanoparticles, polymers, liposomes, micelles, DPCs or other delivery systems available in the art for nucleic acid delivery. The RNAi agents can also be chemically conjugated to targeting groups, lipids (including, but not limited to cholesteryl and cholesteryl derivatives), encapsulating in nanoparticles, liposomes, micelles, conjugating to polymers or DPCs (see, for example WO 2000/053722, WO 2008/022309, WO 2011/104169, and WO 2012/083185, WO 2013/032829, WO 2013/158141, each of which is incorporated herein by reference), by iontophoresis, or by incorporation into other delivery vehicles or systems available in the art such as hydrogels, cyclodextrins, biodegradable nanocapsules, bioadhesive microspheres, or proteinaceous vectors. In some embodiments the RNAi agents can be conjugated to antibodies having affinity for pulmonary epithelial cells. In some embodiments, the RNAi agents can be linked to targeting ligands that have affinity for pulmonary epithelial cells or receptors present on pulmonary epithelial cells.

### Pharmaceutical Compositions and Formulations

[0148] The TSLP RNAi agents disclosed herein can be prepared as pharmaceutical compositions (alternatively referred to as pharmaceutical formulations or medicaments). The pharmaceutical compositions disclosed herein include at least one TSLP RNAi agent. These pharmaceutical compositions are particularly useful in the inhibition of the expression of TSLP mRNA in a target cell, a group of cells, a tissue, or an organism. The pharmaceutical compositions can be used to treat a subject having a disease, disorder, or condition that would benefit from reduction in the level of the target mRNA, or inhibition in expression of the target gene. The pharmaceutical compositions can be used to treat a subject at risk of developing a disease or disorder that would benefit from reduction of the level of the target mRNA or an inhibition in expression the target gene. In one embodiment, the method includes administering a TSLP RNAi agent linked to a targeting ligand as described herein, to a subject to be treated. In some embodiments, one or more pharmaceutically acceptable excipients (including vehicles, carriers, diluents, and/or delivery polymers) are added to the pharmaceutical compositions that include a TSLP RNAi agent, thereby forming a pharmaceutical formulation or medicament suitable for in vivo delivery to a subject, including a human.

[0149] The pharmaceutical compositions that include a TSLP RNAi agent and methods disclosed herein decrease the level of the target mRNA in a cell, group of cells, group of cells, tissue, organ, or subject, including by administering to the subject a therapeutically effective amount of a herein described TSLP RNAi agent, thereby inhibiting the expression of TSLP mRNA in the subject. In some embodiments, the subject has been previously identified or diagnosed as having a disease or disorder that can be mediated at least in part by a reduction in TSLP expression. In some embodiments, the subject has been previously diagnosed with having one or more pulmonary diseases such as asthma (including allergic asthma), chronic obstructive pulmonary disease including but not limited to chronic bronchitis and emphysema, pulmonary inflammatory disorders, interstitial lung diseases (ILD), cystic fibrosis, various other types of fibrosis, infectious diseases (for example, SARS-COV-2), acute lung injury (for example, acute respiratory distress syndrome (ARDS)), pulmonary hypertension, various pulmonary cancers, chronic rhinosinutis either with or without nasal polyps, autoimmune disorders including but not limited to systemic sclerosis (SSc), and multiple inflammatory diseases including but not limited to atopic dermatitis, chronic spontaneous urticaria, and eosinophilic esophagitis.

[0150] Embodiments of the present disclosure include pharmaceutical compositions for delivering a TSLP RNAi agent to a pulmonary epithelial cell in vivo. Such pharmaceutical compositions can include, for example, a TSLP RNAi agent conjugated to a targeting group that comprises an integrin targeting ligand. In some embodiments, the integrin targeting ligand is comprised of an αvβ6 integrin ligand.

[0151] In some embodiments, the described pharmaceutical compositions including a TSLP RNAi agent are used for treating or managing clinical presentations in a subject that would benefit from the inhibition of expression of TSLP. In some embodiments, a therapeutically or prophylactically effective amount of one or more of pharmaceutical compositions is administered to a subject in need of such treatment. In some embodiments, administration of any of the disclosed TSLP RNAi agents can be used to decrease the number, severity, and/or frequency of symptoms of a disease in a subject.

[0152] In some embodiments, the described TSLP RNAi agents are optionally combined with one or more additional (i.e., second, third, etc.) therapeutics. A second therapeutic can be another TSLP RNAi agent (e.g., a TSLP RNAi agent that targets a different sequence within a TSLP gene). In some embodiments, a second therapeutic can be an RNAi agent that targets the TSLP gene. An additional therapeutic can also be a small molecule drug, antibody, antibody fragment, and/or aptamer. The TSLP RNAi agents, with or without the one or more additional therapeutics, can be combined with one or more excipients to form pharmaceutical compositions.

[0153] The described pharmaceutical compositions that include a TSLP RNAi agent can be used to treat at least one symptom in a subject having a disease or disorder that would benefit from reduction or inhibition in expression of TSLP mRNA. In some embodiments, the subject is administered a therapeutically effective amount of one or more pharmaceutical compositions that include a TSLP RNAi agent thereby treating the symptom. In other embodiments, the subject is administered a prophylactically effective amount of one or more TSLP RNAi agents, thereby preventing or inhibiting the at least one symptom.

[0154] In some embodiments, one or more of the described TSLP RNAi agents are administered to a mammal in a pharmaceutically acceptable carrier or diluent. In some embodiments, the mammal is a human.

[0155] The route of administration is the path by which a TSLP RNAi agent is brought into contact with the body. In general, methods of administering drugs, oligonucleotides, and nucleic acids, for treatment of a mammal are well known in the art and can be applied to administration of the compositions described herein. The TSLP RNAi agents disclosed herein can be administered via any suitable route in a preparation appropriately tailored to the particular route. Thus, in some embodiments, the herein described pharmaceutical compositions are administered via inhalation, intranasal administration, intratracheal administration, or oropharyngeal aspiration administration. In some embodiments, the pharmaceutical compositions can be administered by injection, for example, intravenously, intramuscularly, intracutaneously, subcutaneously, intraarticularly, intraocularly, or intraperitoneally, or topically.

[0156] The pharmaceutical compositions including a TSLP RNAi agent described herein can be delivered to a cell, group of cells, tissue, or subject using oligonucleotide delivery technologies known in the art. In general, any suitable method recognized in the art for delivering a nucleic acid molecule (in vitro or in vivo) can be adapted for use with the compositions described herein. For example, delivery can be by local administration, (e.g., direct injection, implantation, or topical administering), systemic administration, or subcutaneous, intravenous, intraperitoneal, or parenteral routes, including intracranial (e.g., intraventricular, intraparenchymal and intrathecal), intramuscular, transdermal, airway (aerosol), nasal, oral, rectal, or topical (including buccal and sublingual) administration. In some embodiments, the compositions are administered via inhalation, intranasal administration, oropharyngeal aspiration administration, or intratracheal administration.

[0157] For example, in some embodiments, it is desired that the TSLP RNAi agents described herein inhibit the expression of an TSLP gene in the pulmonary epithelium, for which administration via inhalation (e.g., by an inhaler device, such as a metered-dose inhaler, or a nebulizer such as a jet or vibrating mesh nebulizer, or a soft mist inhaler) is particularly suitable and advantageous.

[0158] In some embodiments, the pharmaceutical compositions described herein comprise one or more pharmaceutically acceptable excipients. The pharmaceutical compositions described herein are formulated for administration to a subject.

[0159] As used herein, a pharmaceutical composition includes a pharmacologically effective amount of at least one of the described therapeutic compounds and one or more pharmaceutically acceptable excipients. Pharmaceutically acceptable excipients (excipients) are substances other than the Active Pharmaceutical Ingredient (API, therapeutic product, e.g., TSLP RNAi agent) that are intentionally included in the drug delivery system. Excipients do not exert or are not intended to exert a therapeutic effect at the intended dosage. Excipients can act to a) aid in processing of the drug delivery system during manufacture, b) protect, support or enhance stability, bioavailability or patient acceptability of the API, c) assist in product identification, and/or d) enhance any other attribute of the overall safety, effectiveness, of delivery of the API during stoTSLP or use. A pharmaceutically acceptable excipient may or may not be an inert substance.

[0160] Excipients include, but are not limited to: absorption enhancers, anti-adherents, anti-foaming agents, anti-oxidants, binders, buffering agents, carriers, coating agents, colors, delivery enhancers, delivery polymers, detergents, dextran, dextrose, diluents, disintegrants, emulsifiers, extenders, fillers, flavors, glidants, humectants, lubricants, oils, polymers, preservatives, saline, salts, solvents, sugars, surfactants, suspending agents, sustained release matrices, sweeteners, thickening agents, tonicity agents, vehicles, water-repelling agents, and wetting agents.

[0161] Pharmaceutical compositions suitable for injectable use include sterile aqueous solutions (where water-soluble) or dispersions and sterile powders for the extemporaneous preparation of sterile injectable solutions or dispersion. For intravenous administration, suitable carriers include physiological saline, bacteriostatic water, Cremophor® EL™ (BASF, Parsippany, NJ) or phosphate buffered saline (PBS). It should be stable under the conditions of manufacture and storage and should be preserved against the contaminating action of microorganisms such as bacteria and fungi. The carrier can be a solvent or dispersion medium containing, for example, water, ethanol, polyol (for example, glycerol, propylene glycol, and liquid polyethylene glycol), and suitable mixtures thereof. The proper fluidity can be maintained, for example, by the use of a coating such as lecithin, by the maintenance of the required particle size in the case of dispersion and by the use of surfactants. In many cases, it will be preferable to include isotonic agents, for example, sugars, polyalcohols such as mannitol, sorbitol, and sodium chloride in the composition. Prolonged absorption of the injectable compositions can be brought about by including in the composition an agent which delays absorption, for example, aluminum monostearate and gelatin.

[0162] Sterile injectable solutions can be prepared by incorporating the active compound in the required amount in an appropriate solvent with one or a combination of ingredients enumerated above, as required, followed by filter sterilization. Generally, dispersions are prepared by incorporating the active compound into a sterile vehicle which contains a basic dispersion medium and the required other ingredients from those enumerated above. In the case of sterile powders for the preparation of sterile injectable solutions, methods of preparation include vacuum drying and freeze-drying which yields a powder of the active ingredient plus any additional desired ingredient from a previously sterile-filtered solution thereof.

[0163] Formulations suitable for intra-articular administration can be in the form of a sterile aqueous preparation of the drug that can be in microcrystalline form, for example, in the form of an aqueous microcrystalline suspension. Liposomal formulations or biodegradable polymer systems can also be used to present the drug for both intra-articular and ophthalmic administration.

[0164] Formulations suitable for inhalation administration can be prepared by incorporating the active compound in the desired amount in an appropriate solvent, followed by sterile filtration. In general, formulations for inhalation administration are sterile solutions at physiological pH and have low viscosity (<5 cP). Salts may be added to the formulation to balance tonicity. In some cases, surfactants or co-solvents can be added to increase active compound solubility and improve aerosol characteristics. In some cases, excipients can be added to control viscosity in order to ensure size and distribution of nebulized droplets.

[0165] In some embodiments, pharmaceutical formulations that include the TSLP RNAi agents disclosed herein suitable for inhalation administration can be prepared in water for injection (sterile water), or an aqueous sodium phosphate buffer (for example, the TSLP RNAi agent formulated in 0.5 mM sodium phosphate monobasic, 0.5 mM sodium phosphate dibasic, in water).

[0166] The active compounds can be prepared with carriers that will protect the compound against rapid elimination from the body, such as a controlled release formulation, including implants and microencapsulated delivery systems. Biodegradable, biocompatible polymers can be used, such as ethylene vinyl acetate, polyanhydrides, polyglycolic acid, collagen, polyorthoesters, and polylactic acid. Methods for preparation of such formulations will be apparent to those skilled in the art. Liposomal suspensions can also be used as pharmaceutically acceptable carriers. These can be prepared according to methods known to those skilled in the art, for example, as described in U.S. Pat. No. 4,522,811.

[0167] The TSLP RNAi agents can be formulated in compositions in dosage unit form for ease of administration and uniformity of dosage. Dosage unit form refers to physically discrete units suited as unitary dosages for the subject to be treated; each unit containing a predetermined quantity of active compound calculated to produce the desired therapeutic effect in association with the required pharmaceutical carrier. The specification for the dosage unit forms of the disclosure are dictated by and directly dependent on the unique characteristics of the active compound and the therapeutic effect to be achieved, and the limitations inherent in the art of compounding such an active compound for the treatment of individuals.

[0168] A pharmaceutical composition can contain other additional components commonly found in pharmaceutical compositions. Such additional components include, but are not limited to: anti-pruritics, astringents, local anesthetics, or anti-inflammatory agents (e.g., antihistamine, diphenhydramine, etc.). It is also envisioned that cells, tissues, or isolated organs that express or comprise the herein defined RNAi agents may be used as “pharmaceutical compositions.” As used herein, “pharmacologically effective amount,” “therapeutically effective amount,” or simply “effective amount” refers to that amount of an RNAi agent to produce a pharmacological, therapeutic, or preventive result.

[0169] In some embodiments, the methods disclosed herein further comprise the step of administering a second therapeutic or treatment in addition to administering an RNAi agent disclosed herein. In some embodiments, the second therapeutic is another TSLP RNAi agent (e.g., a TSLP RNAi agent that targets a different sequence within the TSLP target). In other embodiments, the second therapeutic can be a small molecule drug, an antibody, an antibody fragment, and/or an aptamer.

[0170] In some embodiments, described herein are compositions that include a combination or cocktail of at least two TSLP RNAi agents having different sequences. In some embodiments, the two or more TSLP RNAi agents are each separately and independently linked to targeting groups. In some embodiments, the two or more TSLP RNAi agents are each linked to targeting groups that include or consist of integrin targeting ligands. In some embodiments, the two or more TSLP RNAi agents are each linked to targeting groups that include or consist of αvβ6 integrin targeting ligands.

[0171] Described herein are compositions for delivery of TSLP RNAi agents to pulmonary epithelial cells. Furthermore, compositions for delivery of TSLP RNAi agents to cells, including renal epithelial cells and/or epithelial cells in the GI or reproductive tract and/or and ocular surface epithelial cells in the eye, in vivo, are generally described herein.

[0172] Generally, an effective amount of a TSLP RNAi agent disclosed herein will be in the range of from about 0.0001 to about 20 mg/kg of body weight/deposited dose, e.g., from about 0.001 to about 5 mg/kg of body weight/deposited dose. In some embodiments, an effective amount of a TSLP RNAi agent will be in the range of from about 0.01 mg/kg to about 3.0 mg/kg of body weight per deposited dose. In some embodiments, an effective amount of a TSLP RNAi agent will be in the range of from about 0.03 mg/kg to about 2.0 mg/kg of body weight per deposited dose. In some embodiments, an effective amount of a TSLP RNAi agent will be in the range of from about 0.01 to about 1.0 mg/kg of deposited dose per body weight. In some embodiments, an effective amount of a TSLP RNAi agent will be in the range of from about 0.50 to about 1.0 mg/kg of deposited dose per body weight. Calculating the pulmonary deposited dose (PDD) is done in accordance with methods known in the art. (See Wolff R. K., Dorato M. A., Toxicologic Testing of Inhaled Pharmaceutical Aerosols, Crit Rev Toxicol., 1993; 23(4):343-369; Tepper et al., International J. Toxicology, 2016, vol. 35(4):376-392). The amount administered will also likely depend on such variables as the overall health status of the patient, the relative biological efficacy of the compound delivered, the formulation of the drug, the presence and types of excipients in the formulation, and the route of administration. Also, it is to be understood that the initial dosage administered can be increased beyond the above upper level to rapidly achieve the desired blood-level or tissue level, or the initial dosage can be smaller than the optimum. In some embodiments, a dose is administered daily. In some embodiments, a dose is administered weekly. In further embodiments, a dose is administered bi-weekly, tri-weekly, once monthly, or once quarterly (i.e., once every three months).

[0173] For treatment of disease or for formation of a medicament or composition for treatment of a disease, the pharmaceutical compositions described herein including a TSLP RNAi agent can be combined with an excipient or with a second therapeutic agent or treatment including, but not limited to: a second or other RNAi agent, a small molecule drug, an antibody, an antibody fragment, peptide, and/or an aptamer.

[0174] The described TSLP RNAi agents, when added to pharmaceutically acceptable excipients or adjuvants, can be packaged into kits, containers, packs, or dispensers. The pharmaceutical compositions described herein can be packaged in dry powder or aerosol inhalers, other metered-dose inhalers, nebulizers, pre-filled syringes, or vials.

### Methods of Treatment and Inhibition of TSLP Expression

[0175] The TSLP RNAi agents disclosed herein can be used to treat a subject (e.g., a human or other mammal) having a disease or disorder that would benefit from administration of the RNAi agent. In some embodiments, the RNAi agents disclosed herein can be used to treat a subject (e.g., a human) that would benefit from a reduction and/or inhibition in expression of TSLP mRNA and/or a reduction in TSLP cytokine levels.

[0176] In some embodiments, the RNAi agents disclosed herein can be used to treat a subject (e.g., a human) having a disease or disorder for which the subject would benefit from reduction in TSLP cytokine levels, including but not limited to, chronic obstructive pulmonary disease including but not limited to chronic bronchitis and emphysema, pulmonary inflammatory disorders, interstitial lung diseases (ILD), cystic fibrosis, various other types of fibrosis, infectious diseases (for example, SARS-COV-2), acute lung injury (for example, acute respiratory distress syndrome (ARDS)), pulmonary hypertension, various pulmonary cancers, chronic rhinosinutis either with or without nasal polyps, autoimmune disorders including but not limited to systemic sclerosis (SSc), and multiple inflammatory diseases including but not limited to atopic dermatitis, chronic spontaneous urticaria, and eosinophilic esophagitis. In some embodiments the disease is allergic asthma. In some embodiments the subject has been previously diagnosed with having asthma, or more specifically, allergic asthma, or another pulmonary inflammatory diseases. Treatment of a subject can include therapeutic and/or prophylactic treatment. The subject is administered a therapeutically effective amount of any one or more TSLP RNAi agents described herein. The subject can be a human, patient, or human patient. The subject may be an adult, adolescent, child, or infant. Administration of a pharmaceutical composition described herein can be to a human being or animal.

[0177] Increased TSLP cytokine levels are known to contribute to aberrant epithelial cell, fibroblast, and immune cell function and have been linked to fibrosis particularly in pulmonary tissues and cells. In some embodiments, the described TSLP RNAi agents are used to treat at least one symptom mediated at least in part by a reduction in TSLP cytokine levels, in a subject. The subject is administered a therapeutically effective amount of any one or more of the described TSLP RNAi agents. In some embodiments, the subject is administered a prophylactically effective amount of any one or more of the described RNAi agents, thereby treating the subject by preventing or inhibiting the at least one symptom.

[0178] In certain embodiments, the present disclosure provides methods for treatment of diseases, disorders, conditions, or pathological states mediated at least in part by TSLP gene expression, in a patient in need thereof, wherein the methods include administering to the patient any of the TSLP RNAi agents described herein.

[0179] In some embodiments, the TSLP RNAi agents are used to treat or manage a clinical presentation or pathological state in a subject, wherein the clinical presentation or pathological state is mediated at least in part by a reduction in TSLP expression. The subject is administered a therapeutically effective amount of one or more of the TSLP RNAi agents or TSLP RNAi agent-containing compositions described herein. In some embodiments, the method comprises administering a composition comprising a TSLP RNAi agent described herein to a subject to be treated.

[0180] In a further aspect, the disclosure features methods of treatment (including prophylactic or preventative treatment) of diseases or symptoms that may be addressed by a reduction in TSLP cytokine levels, the methods comprising administering to a subject in need thereof a TSLP RNAi agent that includes an antisense strand comprising the sequence of any of the sequences in Table 2, Table 3, or Table 10. Also described herein are compositions for use in such methods.

[0181] The described TSLP RNAi agents and/or compositions that include TSLP RNAi agents can be used in methods for therapeutic treatment of disease or conditions caused by enhanced or elevated TSLP cytokine levels. Such methods include administration of a TSLP RNAi agent as described herein to a subject, e.g., a human or animal subject.

[0182] In another aspect, the disclosure provides methods for the treatment (including prophylactic treatment) of a pathological state (such as a condition or disease) mediated at least in part by TSLP expression, wherein the methods include administering to a subject a therapeutically effective amount of an RNAi agent that includes an antisense strand comprising the sequence of any of the sequences in Table 2, Table 3, or Table 10.

[0183] In some embodiments, methods for inhibiting expression of an TSLP gene are disclosed herein, wherein the methods include administering to a cell an RNAi agent that includes an antisense strand comprising the sequence of any of the sequences in Table 2, Table 3, or Table 10.

[0184] In some embodiments, methods for the treatment (including prophylactic treatment) of a pathological state mediated at least in part by TSLP expression are disclosed herein, wherein the methods include administering to a subject a therapeutically effective amount of an RNAi agent that includes a sense strand comprising the sequence of any of the sequences in Table 2, Table 4, Table 5, Table 6, or Table 10.

[0185] In some embodiments, methods for inhibiting expression of an TSLP gene are disclosed herein, wherein the methods comprise administering to a cell an RNAi agent that includes a sense strand comprising the sequence of any of the sequences in Table 2, Table 4, Table 5, Table 6, or Table 10.

[0186] In some embodiments, methods for the treatment (including prophylactic treatment) of a pathological state mediated at least in part by TSLP expression are disclosed herein, wherein the methods include administering to a subject a therapeutically effective amount of an RNAi agent that includes a sense strand comprising the sequence of any of the sequences in Table 4, Table 5, Table 6, or Table 10, and an antisense strand comprising the sequence of any of the sequences in Table 3 or Table 10.

[0187] In some embodiments, methods for inhibiting expression of a TSLP gene are disclosed herein, wherein the methods include administering to a cell an RNAi agent that includes a sense strand comprising the sequence of any of the sequences in Table 4, Table 5, Table 6, or Table 10, and an antisense strand comprising the sequence of any of the sequences in Table 3 or Table 10.

[0188] In some embodiments, methods of inhibiting expression of a TSLP gene are disclosed herein, wherein the methods include administering to a subject a TSLP RNAi agent that includes a sense strand consisting of the nucleobase sequence of any of the sequences in Table 4, Table 5, Table 6, or Table 10, and the antisense strand consisting of the nucleobase sequence of any of the sequences in Table 3 or Table 10. In other embodiments, disclosed herein are methods of inhibiting expression of a TSLP gene, wherein the methods include administering to a subject a TSLP RNAi agent that includes a sense strand consisting of the modified sequence of any of the modified sequences in Table 4, Table 5, Table 6, or Table 10, and the antisense strand consisting of the modified sequence of any of the modified sequences in Table 3 or Table 10.

[0189] In some embodiments, methods for inhibiting expression of an TSLP gene in a cell are disclosed herein, wherein the methods include administering one or more TSLP RNAi agents comprising a duplex structure of one of the duplexes set forth in Tables 7A, 7B, 8, 9, and 10.

[0190] In some embodiments, the TSLP gene expression level and/or TSLP mRNA level in certain pulmonary epithelial cells of subject to whom a described TSLP RNAi agent is administered is reduced by at least about 5%, 10%, 15%, 20%, 25%, 30%, 35%, 40%, 45%, 50%, 55%, 60%, 65%, 70%, 75%, 80%, 85%, 90%, 95%, 96%, 97%, 98%, 99%, or greater than 99%, relative to the subject's respective level prior to being administered the TSLP RNAi agent or to a different subject not receiving the TSLP RNAi agent. In some embodiments, the TSLP cytokine levels in certain epithelial cells or circulating TSLP cytokine levels of a subject to whom a described TSLP RNAi agent is administered is reduced by at least about 5%, 10%, 15%, 20%, 25%, 30%, 35%, 40%, 45%, 50%, 55%, 60%, 65%, 70%, 75%, 80%, 85%, 90%, 95%, 96%, 97%, 98%, 99%, or greater than 99%, relative to the subject prior to being administered the TSLP RNAi agent or to a different subject not receiving the TSLP RNAi agent. The gene expression level, cytokine or protein level, and/or mRNA level in the subject may be reduced in a cell, group of cells, serum, and/or tissue of the subject. In some embodiments, the TSLP cytokine levels in certain subject to whom a described TSLP RNAi agent has been administered is reduced by at least about 30%, 35%, 40%, 45%, 50%, 55%, 60%, 65%, 70%, 75%, 80%, 85%, 90%, 95%, or 98% relative to the subject prior to being administered the TSLP RNAi agent or to a subject not receiving the TSLP RNAi agent.

[0191] A reduction in gene expression, mRNA, and cytokine or protein levels can be assessed by any methods known in the art. Reduction or decrease in TSLP cytokine levels or TSLP mRNA levels are sometimes collectively referred to herein as a decrease in, reduction of, or inhibition of TSLP gene expression. The Examples set forth herein illustrate known methods for assessing inhibition of TSLP.

### Cells, Tissues, Organs, and Non-Human Organisms

[0192] Cells, tissues, organs, and non-human organisms that include at least one of the TSLP RNAi agents described herein are contemplated. The cell, tissue, organ, or non-human organism is made by delivering the RNAi agent to the cell, tissue, organ, or non-human organism.

### REFERENCES

[0193] Adhikary, P. P., et al. (2021). “TSLP as druggable target—a silver-lining for atopic diseases?” Pharmacol Ther 217: 107648.
[0194] Al-Shami, A., et al. (2005). “A role for TSLP in the development of inflammation in an asthma model.” J Exp Med 202(6): 829-839.
[0195] Chen, Z. et al. (2018). “Thymic stromal lymphopoietin contribution to the recruitment of circulating fibrocytes to the lung in a mouse model of chronic allergic asthma.” J Asthma 55(9): 975-983.
[0196] Corren, J., et al. (2017). “Tezepelumab in Adults with Uncontrolled Asthma.” N Engl J Med 377(10): 936-946.
[0197] Diver, S., et al. (2021). “Effect of tezepelumab on airway inflammatory cells, remodelling, and hyperresponsiveness in patients with moderate-to-severe uncontrolled asthma (CASCADE): a double-blind, randomised, placebo-controlled, phase 2 trial.” Lancet Respir Med 9(11): 1299-1312.
[0198] Gauvreau, G. M., et al. (2020). “Thymic stromal lymphopoietin: its role and potential as a therapeutic target in asthma.” Expert Opin Ther Targets 24(8): 777-792.
[0199] Hu, Y., et al. (2017). “TSLP signaling blocking alleviates E-cadherin dysfunction of airway epithelium in a HDM-induced asthma model.” Cell Immunol 315: 56-63.
[0200] Li, Y. L., et al. (2010). “Thymic stromal lymphopoietin promotes lung inflammation through activation of dendritic cells.” J Asthma 47(2): 117-123.
[0201] Menzies-Gow, A., et al. (2021). “Tezepelumab in Adults and Adolescents with Severe, Uncontrolled Asthma.” N Engl J Med 384(19): 1800-1809.
[0202] Pandey, A., et al. (2000). “Cloning of a receptor subunit required for signaling by thymic stromal lymphopoietin.” Nat Immunol 1(1): 59-64.
[0203] Parnes, J. R, et al. (2022). “Targeting TSLP in Asthma.” J Asthma Allergy 15: 749-765.
[0204] Pelaia, C., et al. (2021). “Tezepelumab: A Potential New Biological Therapy for Severe Refractory Asthma.” Int J Mol Sci 22(9).
[0205] Puzzovio, P. G., et al. (2022). “Tezepelumab administration in moderate-to-severe uncontrolled asthma: Is it all about eosinophils?” J Allergy Clin Immunol 149(5): 1582-1584.
[0206] Torgerson, D. G., et al. (2011). “Meta-analysis of genome-wide association studies of asthma in ethnically diverse North American populations.” Nat Genet 43(9): 887-892.
[0207] Ying, S., et al. (2008). “Expression and cellular provenance of thymic stromal lymphopoietin and chemokines in patients with severe asthma and chronic obstructive pulmonary disease.” J Immunol 181(4): 2790-2798.
[0208] Ying, S., et al. (2005). “Thymic stromal lymphopoietin expression is increased in asthmatic airways and correlates with expression of Th2-attracting chemokines and disease severity.” J Immunol 174(12): 8183-8190.
[0209] Yu, G., et al. (2019). “Thymic stromal lymphopoietin (TSLP) and Toluene-diisocyanate-induced airway inflammation: Alleviation by TSLP neutralizing antibody.” Toxicol Lett 317: 59-67.
[0210] Zhou, B., et al. (2005). “Thymic stromal lymphopoietin as a key initiator of allergic airway inflammation in mice.” Nat Immunol 6(10): 1047-1053.

### ADDITIONAL ILLUSTRATIVE EMBODIMENTS

[0211] Provided here are certain additional illustrative embodiments of the disclosed technology. These embodiments are illustrative only and do not limit the scope of the present disclosure or of the claims attached hereto.
[0212] 1. An RNAi agent for inhibiting expression of a thymic stromal lymphopoietin gene, comprising:
   [0213] an antisense strand comprising at least 17 contiguous nucleotides differing by 0 or 1 nucleotides from any one of the sequences provided in Table 2 or Table 3; and
   [0214] a sense strand comprising a nucleotide sequence that is at least partially complementary to the antisense strand.
[0215] 2. The RNAi agent of embodiment 1, wherein the antisense strand comprises nucleotides 2-18 of any one of the sequences provided in Table 2 or Table 3.
[0216] 3. The RNAi agent of embodiment 1 or embodiment 2, wherein the sense strand comprises a nucleotide sequence of at least 17 contiguous nucleotides differing by 0 or 1 nucleotides from any one of the sequences provided in Table 2 or Table 4, and wherein the sense strand has a region of at least 85% complementarity over the 17 contiguous nucleotides to the antisense strand.
[0217] 4. The RNAi agent of any one of embodiments 1-3, wherein at least one nucleotide of the TSLP RNAi agent is a modified nucleotide or includes a modified internucleoside linkage.
[0218] 5. The RNAi agent of any one of embodiments 1-4, wherein all or substantially all of the nucleotides are modified nucleotides.
[0219] 6. The RNAi agent of any one of embodiments 4-5, wherein the modified nucleotide is selected from the group consisting of: 2′-O-methyl nucleotide, 2′-fluoro nucleotide, 2′-deoxy nucleotide, 2′,3′-seco nucleotide mimic, locked nucleotide, 2′-F-arabino nucleotide, 2′-methoxyethyl nucleotide, abasic nucleotide, ribitol, inverted nucleotide, inverted 2′-O-methyl nucleotide, inverted 2′-deoxy nucleotide, 2′-amino-modified nucleotide, 2′-alkyl-modified nucleotide, morpholino nucleotide, vinyl phosphonate-containing nucleotide, cyclopropyl phosphonate-containing nucleotide, and 3′-O-methyl nucleotide.
[0220] 7. The RNAi agent of embodiment 5, wherein all or substantially all of the nucleotides are modified with 2′-O-methyl nucleotides, 2′-fluoro nucleotides, or combinations thereof.
[0221] 8. The RNAi agent of any one of embodiments 1-7, wherein the antisense strand comprises the nucleotide sequence of any one of the modified sequences provided in Table 3.
[0222] 9. The RNAi agent of any one of embodiments 1-8, wherein the sense strand comprises the nucleotide sequence of any one of the modified sequences provided in Table 4.
[0223] 10. The RNAi agent of embodiment 1, wherein the antisense strand comprises the nucleotide sequence of any one of the modified sequences provided in Table 3 and the sense strand comprises the nucleotide sequence of any one of the modified sequences provided in Table 4.
[0224] 11. The RNAi agent of any one of embodiments 1-10, wherein the sense strand is between 18 and 30 nucleotides in length, and the antisense strand is between 18 and 30 nucleotides in length.
[0225] 12. The RNAi agent of embodiment 11, wherein the sense strand and the antisense strand are each between 18 and 27 nucleotides in length.
[0226] 13. The RNAi agent of embodiment 12, wherein the sense strand and the antisense strand are each between 18 and 24 nucleotides in length.
[0227] 14. The RNAi agent of embodiment 13, wherein the sense strand and the antisense strand are each 21 nucleotides in length.
[0228] 15. The RNAi agent of embodiment 14, wherein the RNAi agent has two blunt ends.
[0229] 16. The RNAi agent of any one of embodiments 1-15, wherein the sense strand comprises one or two terminal caps.
[0230] 17. The RNAi agent of any one of embodiments 1-16, wherein the sense strand comprises one or two inverted abasic residues.
[0231] 18. The RNAi agent of embodiment 1, wherein the RNAi agent is comprised of a sense strand and an antisense strand that form a duplex having the structure of any one of the duplexes in Table 7A, Table 7B, Table 8, Table 9, or Table 10.
[0232] 19. The RNAi agent of embodiment 18, wherein all or substantially all of the nucleotides are modified nucleotides.
[0233] 20. The RNAi agent of embodiment 1, comprising an antisense strand that consists of, consists essentially of, or comprises a nucleotide sequence that differs by 0 or 1 nucleotides from one of the following nucleotide sequences (5′→3′):

(SEQ ID NO: 836)
AGACAUUUAUUGGUUGUGACC;
(SEQ ID NO: 853)
AGACGUUUAUUGGUUGUGACC;
(SEQ ID NO: 837)
UGACAUUUAUUGGUUGUGACC;
(SEQ ID NO: 856)
UGACGUUUAUUGGUUGUGACC;
(SEQ ID NO: 196)
AGACAUUUAUUGGUUGUGA;
(SEQ ID NO: 197)
UGACAUUUAUUGGUUGUGA;
(SEQ ID NO: 137)
UUAGCAUUUAUCUGAGUUU;
(SEQ ID NO: 139)
UUAGCAUUUAUCUGAGUUC;
(SEQ ID NO: 192)
UACAUUUAUUGGUUGUGAC;
(SEQ ID NO: 830)
AGACAUUUAUUGGUUGUGACU;
(SEQ ID NO: 825)
UUAGCAUUUAUCUGAGUUUCC;
or
(SEQ ID NO: 826)
UACAUUUAUUGGUUGUGACUU.

[0234] 21. The RNAi agent of embodiment 20, wherein the sense strand consists of, consists essentially of, or comprises a nucleotide sequence that differs by 0 or 1 nucleotides from one of the following nucleotide sequences (5′→3′):

(SEQ ID NO: 872)
GGUCACAACCAAUAAAUGUCU;
(SEQ ID NO: 873)
GGUCACAACCAAUAAAUGUCA;
(SEQ ID NO: 461)
UCACAACCAAUAAAUGUCU;
(SEQ ID NO: 462)
UCACAACCAAUAAAUGUCA;
(SEQ ID NO: 402)
AAACUCAGAUAAAUGCUAA;
(SEQ ID NO: 871)
G(A^{2N})ACUCAGAUAAAUGCUAA;
(SEQ ID NO: 457)
GUCACAACCAAUAAAUGUA
(SEQ ID NO: 864)
AGUCACAACCAAUAAAUGUCU;
(SEQ ID NO: 866)
GGAAACUCAGAUAAAUGCUAA;
or
(SEQ ID NO: 863)
(A^{2N})AGUCACAACCAAUAAAUGUA, wherein (A^{2N})

[0235] represents a 2-aminoadenosine nucleotide.
[0236] 22. The RNAi agent of embodiment 20 or 21, wherein all or substantially all of the nucleotides are modified nucleotides.
[0237] 23. The RNAi agent of embodiment 1, comprising an antisense strand that comprises, consists of, or consists essentially of a modified nucleotide sequence that differs by 0 or 1 nucleotides from one of the following nucleotide sequences (5′→3′):

(SEQ ID NO: 649)
cPrpasGfsacauuuaUfuGfgUfuGfugacsc
(SEQ ID NO: 609)
cPrpasGfsaCfaUfuUfaUfuGfgUfuGfuGfaCfsu;
(SEQ ID NO: 611)
cPrpasGfsacauuuaUfuGfgUfuGfugacsu;
(SEQ ID NO: 681)
cPrpasGfsacguuuaUfuGfgUfuGfugacsc;
(SEQ ID NO: 612)
cPrpasGfsacauuuAfuuGfgUfuGfugacsu;
(SEQ ID NO: 603)
cPrpusUfsagcauuUfauCfuGfaGfuuucsc;
(SEQ ID NO: 606)
cPrpusUfsagcauUfuauCfuGfaGfuuucsc;
or
(SEQ ID NO: 594)
cPrpusAfscsAfuUfuAfuUfgGfuUfgUfgAfcUfsu;

wherein a represents 2′-O-methyl adenosine, c represents 2′-O-methyl cytidine, g represents 2′-O-methyl guanosine, and u represents 2′-O-methyl uridine; Af, represents 2′-fluoro adenosine, Cf represents 2′-fluoro cytidine, Gf represents 2′-fluoro guanosine, and Uf represents 2′-fluoro uridine; cPrpa represents a 5′-cyclopropyl phosphonate-2′-O-methyl adenosine; cPrpu represents a 5′-cyclopropyl phosphonate-2′-O-methyl uridine; s represents a phosphorothioate linkage; and wherein all or substantially all of the nucleotides on the sense strand are modified nucleotides.
[0238] 24. The RNAi agent of embodiment 1, wherein the sense strand comprises, consists of, or consists essentially of a modified nucleotide sequence that differs by 0 or 1 nucleotides from one of the following nucleotide sequences (5′→3′):

(SEQ ID NO: 714)
gsgucacaaCfCfAfauaaaugucu;
(SEQ ID NO: 702)
asgucacaaCfCfAfauaaaugucu;
(SEQ ID NO: 704)
gsgaaacucAfGfAfuaaaugcuaa;
(SEQ ID NO: 701)
a_2NsagucacaAfCfCfaauaaaugua;

wherein a represents 2′-O-methyl adenosine, c represents 2′-O-methyl cytidine, g represents 2′-O-methyl guanosine, and u represents 2′-O-methyl uridine; Af, represents 2′-fluoro adenosine, Cf represents 2′-fluoro cytidine, Gf represents 2′-fluoro guanosine, and Uf represents 2′-fluoro uridine; a 2N represents 2′-O-methyl-2-aminoadenosine; s represents a phosphorothioate linkage; and wherein all or substantially all of the nucleotides on the antisense strand are modified nucleotides.
[0239] 25. The RNAi agent of any one of embodiments 20-24, wherein the sense strand further includes inverted abasic residues at the 3′ terminal end of the nucleotide sequence, at the 5′ end of the nucleotide sequence, or at both.
[0240] 26. The RNAi agent of any one of embodiments 1-25, wherein the RNAi agent is linked to a targeting ligand.
[0241] 27. The RNAi agent of embodiment 26, wherein the targeting ligand has affinity for a cell receptor expressed on an epithelial cell.
[0242] 28. The RNAi agent of embodiment 27, wherein the targeting ligand comprises an integrin targeting ligand.
[0243] 29. The RNAi agent of embodiment 28, wherein the integrin targeting ligand is an αvβ6 integrin targeting ligand.
[0244] 30. The RNAi agent of embodiment 29, wherein the targeting ligand comprises the structure:

[chemical structure]

or a pharmaceutically acceptable salt thereof, or

[chemical structure]

or a pharmaceutically acceptable salt thereof,
[0245] wherein [symbol] indicates the point of connection to the RNAi agent.
[0246] 31. The RNAi agent of any one of embodiments 26-29, wherein the targeting ligand has a structure selected from the group consisting of:

[chemical structure]

[chemical structure]

[chemical structure]

[chemical structure]

[chemical structure]

[chemical structure]

[chemical structure]

[chemical structure]

[chemical structure]

[0247] wherein [symbol] indicates the point of connection to the RNAi agent.
[0248] 32. The RNAi agent of embodiment 31, wherein RNAi agent is conjugated to a targeting ligand having the following structure:

[chemical structure]

[0249] 33. The RNAi agent of any one of embodiments 26-32, wherein the targeting ligand is 7 conjugated to the sense strand.
[0250] 34. The RNAi agent of embodiment 33, wherein the targeting ligand is conjugated to the 5′ terminal end of the sense strand.
[0251] 35. The RNAi agent of any one of embodiments 1-34, wherein the RNAi agent is a pharmaceutically acceptable salt.
[0252] 36. The RNAi agent of any one of embodiment 35, wherein the RNAi agent is a sodium salt.
[0253] 37. A composition comprising the RNAi agent of any one of embodiments 1-36, wherein the composition further comprises a pharmaceutically acceptable excipient.
[0254] 38. The composition of embodiment 37, further comprising a second RNAi agent capable of inhibiting the expression of thymic stromal lymphopoietin gene expression.
[0255] 39. The composition of any one of embodiments 37-38, further comprising one or more additional therapeutics.
[0256] 40. The composition of any one of embodiments 37-39, wherein the composition is formulated for administration by inhalation.
[0257] 41. The composition of embodiment 40, wherein the composition is delivered by a metered-dose inhaler, jet nebulizer, vibrating mesh nebulizer, or soft mist inhaler.
[0258] 42. The composition of any of embodiments 37-41, wherein the RNAi agent is a sodium salt.
[0259] 43. The composition of any of embodiments 37-42, wherein the pharmaceutically acceptable excipient is water for injection.
[0260] 44. The composition of any of embodiments 37-42, wherein the pharmaceutically acceptable excipient is a buffered saline solution.
[0261] 45. A method for inhibiting expression of a TSLP gene in a cell, the method comprising introducing into a cell an effective amount of an RNAi agent of any one of embodiments 1-35 or the composition of any one of embodiments 37-45.
[0262] 46. The method of embodiment 45, wherein the cell is within a subject.
[0263] 47. The method of embodiment 46, wherein the subject is a human subject.
[0264] 48. The method of any one of embodiments 45-47, wherein following the administration of the RNAi agent the thymic stromal lymphopoietin gene expression is inhibited by at least about 30%.
[0265] 49. A method of treating one or more symptoms or diseases associated with enhanced or elevated TSLP cytokine activity levels, the method comprising administering to a human subject in need thereof a therapeutically effective amount of the composition of any one of embodiments 37-44.
[0266] 50. The method of embodiment 49, wherein the disease is asthma including but not limited to allergic asthma, chronic obstructive pulmonary disease including but not limited to chronic bronchitis and emphysema, pulmonary inflammatory disorders, interstitial lung diseases (ILD), cystic fibrosis, various other types of fibrosis, infectious diseases (for example, SARS-COV-2), acute lung injury (for example, acute respiratory distress syndrome (ARDS)), pulmonary hypertension, various pulmonary cancers, chronic rhinosinutis either with or without nasal polyps, autoimmune disorders including but not limited to systemic sclerosis (SSc), and multiple inflammatory diseases including but not limited to atopic dermatitis, chronic spontaneous urticaria, and eosinophilic esophagitis.
[0267] 51. The method of embodiment 50, wherein the disease is allergic asthma.
[0268] 52. The method of any one of embodiments 45-51, wherein the RNAi agent is administered at a deposited dose of about 0.01 mg/kg to about 5.0 mg/kg of body weight of the subject.
[0269] 53. The method of any one of embodiments 45-52, wherein the RNAi agent is administered at a deposited dose of about 0.03 mg/kg to about 2.0 mg/kg of body weight of the subject.
[0270] 54. The method of any of embodiments 45-53, wherein the RNAi agent is administered in two or more doses.
[0271] 55. Use of the RNAi agent of any one of embodiments 1-36, for the treatment of a disease, disorder, or symptom that is mediated at least in part by TSLP cytokine activity and/or TSLP gene expression.
[0272] 56. Use of the composition according to any one of embodiments 37-44, for the treatment of a disease, disorder, or symptom that is mediated at least in part by thymic stromal lymphopoietin cytokine activity and/or thymic stromal lymphopoietin gene expression.
[0273] 57. Use of the composition according to any one of embodiments 37-44, for the manufacture of a medicament for treatment of a disease, disorder, or symptom that is mediated at least in part by thymic stromal lymphopoietin cytokine and/or thymic stromal lymphopoietin gene expression.
[0274] 58. The use of any one of embodiments 55-57, wherein the disease is pulmonary inflammation.
[0275] 59. A method of making an RNAi agent of any one of embodiments 1-36, comprising annealing a sense strand and an antisense strand to form a double-stranded ribonucleic acid molecule.
[0276] 60. The method of embodiment 59, wherein the sense strand comprises a targeting ligand.
[0277] 61. The method of embodiment 60, comprising conjugating a targeting ligand to the sense strand.

[0278] The above provided embodiments and items are now illustrated with the following, non-limiting examples.

### EXAMPLES

### Example 1. Synthesis of TSLP RNAI Agents

[0279] TSLP RNAi agent duplexes disclosed herein were synthesized in accordance with the following:

[0280] A. Synthesis. The sense and antisense strands of the TSLP RNAi agents were synthesized according to phosphoramidite technology on solid phase used in oligonucleotide synthesis. Depending on the scale, a MerMade96E® (Bioautomation), a MerMade12® (Bioautomation), or an OP Pilot 100 (GE Healthcare) was used. Syntheses were performed on a solid support made of controlled pore glass (CPG, 500 Å or 600 Å, obtained from Prime Synthesis, Aston, PA, USA). The monomer positioned at the 3′ end of the respective strand attached to the solid support was used as a starting point for synthesis and is acquired commercially. All RNA and 2′-modified RNA phosphoramidites were purchased from Thermo Fisher Scientific (Milwaukee, WI, USA). Specifically, the 2′-O-methyl phosphoramidites that were used included the following: (5′-O-dimethoxytrityl-N⁶-(benzoyl)-2′-O-methyl-adenosine-3′-O-(2-cyanoethyl-N,N-diisopropylamino) phosphoramidite, 5′-O dimethoxy-trityl-N⁴-(acetyl)-2′-O-methyl-cytidine-3′-O-(2-cyanoethyl-N,N-diisopropylamino) phosphoramidite, (5′-O-dimethoxytrityl-N²-(isobutyryl)-2′-O-methyl-guanosine-3′-O-(2-cyanoethyl-N,N-diisopropylamino) phosphoramidite, and 5′-O-dimethoxytrityl-2′-O-methyl-uridine-3′-O-(2-cyanoethyl-N,N-diisopropylamino) phosphoramidite. The 2′-deoxy-2′-fluoro-phosphoramidites carried the same protecting groups as the 2′-O-methyl RNA amidites. 5′-dimethoxytrityl-2′-O-methyl-inosine-3′-O-(2-cyanoethyl-N,N-diisopropylamino) phosphoramidites were purchased from Glen Research (Virginia). The inverted abasic (3′-O-dimethoxytrityl-2′-deoxyribose-5′-O-(2-cyanoethyl-N,N-diisopropylamino) phosphoramidites were purchased from ChemGenes (Wilmington, MA, USA). The following UNA phosphoramidites were used: 5′-(4,4′-Dimethoxytrityl)-N6-(benzoyl)-2′,3′-seco-adenosine, 2′-benzoyl-3′-[(2-cyanoethyl)-(N,N-diisopropyl)]-phosphoramidite, 5′-(4,4′-Dimethoxytrityl)-N-acetyl-2′,3′-seco-cytosine, 2′-benzoyl-3′-[(2-cyanoethyl)-(N,N-diiso-propyl)]-phosphoramidite, 5′-(4,4′-Dimethoxytrityl)-N-isobutyryl-2′,3′-seco-guanosine, 2′-benzoyl-3′-[(2-cyanoethyl)-(N,N-diisopropyl)]-phosphoramidite, and 5′-(4,4′-Dimethoxy-trityl)-2′,3′-seco-uridine, 2′-benzoyl-3′-[(2-cyanoethyl)-(N,N-diiso-propyl)]-phosphoramidite. TFA aminolink phosphoramidites were also commercially purchased (ThermoFisher). Linker L6 was purchased as propargyl-PEG5-NHS from BroadPharm (catalog #BP-20907) and coupled to the NH₂-C₆ group from an aminolink phosphoramidite to form -L6-C6-, using standard coupling conditions. In each case, phosphorothioate linkages were introduced as specified using the conditions set forth herein. The cyclopropyl phosphonate phosphoramidites were synthesized in accordance with International Patent Application Publication No. WO 2017/214112 (see also Altenhofer et. al., Chem. Communications (Royal Soc. Chem.), 57(55):6808-6811 (July 2021)).

[0281] Tri-alkyne-containing phosphoramidites were dissolved in anhydrous dichloromethane or anhydrous acetonitrile (50 mM), while all other amidites were dissolved in anhydrous acetonitrile (50 mM) and molecular sieves (3 Å) were added. 5-Benzylthio-1H-tetrazole (BTT, 250 mM in acetonitrile) or 5-Ethylthio-1H-tetrazole (ETT, 250 mM in acetonitrile) was used as activator solution. Coupling times were 10 minutes (RNA), 90 seconds (2′ O-Me), and 60 seconds (2′ F). In order to introduce phosphorothioate linkages, a 100 mM solution of 3-phenyl 1,2,4-dithiazoline-5-one (POS, obtained from PolyOrg, Inc., Leominster, MA, USA) in anhydrous acetonitrile was employed.

[0282] Alternatively, tri-alkyne moieties were introduced post-synthetically (see section E, below). For this route, the sense strand was functionalized with a 5′ and/or 3′ terminal nucleotide containing a primary amine. TFA aminolink phosphoramidite was dissolved in anhydrous acetonitrile (50 mM) and molecular sieves (3 Å) were added. 5-Benzylthio-1H-tetrazole (BTT, 250 mM in acetonitrile) or 5-Ethylthio-1H-tetrazole (ETT, 250 mM in acetonitrile) was used as activator solution. Coupling times were 10 minutes (RNA), 90 seconds (2′ O-Me), and 60 seconds (2′ F). In order to introduce phosphorothioate linkages, a 100 mM solution of 3-phenyl 1,2,4-dithiazoline-5-one (POS, obtained from PolyOrg, Inc., Leominster, MA, USA) in anhydrous acetonitrile was employed.

[0283] B. Cleavage and deprotection of support bound oligomer. After finalization of the solid phase synthesis, the dried solid support was treated with a 1:1 volume solution of 40 wt. % methylamine in water and 28% to 31% ammonium hydroxide solution (Aldrich) for 1.5 hours at 30° C. The solution was evaporated and the solid residue was reconstituted in water (see below).

[0284] C. Purification. Crude oligomers were purified by anionic exchange HPLC using a TSKgel SuperQ-5PW 13 μm column and Shimadzu LC-8 system. Buffer A was 20 mM Tris, 5 mM EDTA, pH 9.0 and contained 20% Acetonitrile and buffer B was the same as buffer A with the addition of 1.5 M sodium chloride. UV traces at 260 nm were recorded. Appropriate fractions were pooled then run on size exclusion HPLC using a GE Healthcare XK 16/40 column packed with Sephadex G-25 fine with a running buffer of 100 mM ammonium bicarbonate, pH 6.7 and 20% Acetonitrile or filtered water. Alternatively, pooled fractions were desalted and exchanged into an appropriate buffer or solvent system via tangential flow filtration.

[0285] D. Annealing. Complementary strands were mixed by combining equimolar RNA solutions (sense and antisense) in 1×PBS (Phosphate-Buffered Saline, 1×, Corning, Cellgro) to form the RNAi agents. Some RNAi agents were lyophilized and stored at −15 to −25° C. Duplex concentration was determined by measuring the solution absorbance on a UV-Vis spectrometer in 1×PBS. The solution absorbance at 260 nm was then multiplied by a conversion factor (0.050 mg/(mL·cm)) and the dilution factor to determine the duplex concentration.

[0286] E. Conjugation of Tri-alkyne linker. In some embodiments a tri-alkyne linker is conjugated to the sense strand of the RNAi agent on resin as a phosphoramidite (see Example 1G for the synthesis of an example tri-alkyne linker phosphoramidite and Example 1A for the conjugation of the phosphoramidite.). In other embodiments, a tri-alkyne linker may be conjugated to the sense strand following cleavage from the resin, described as follows: either prior to or after annealing, in some embodiments, the 5′ or 3′ amine functionalized sense strand is conjugated to a tri-alkyne linker. An example tri-alkyne linker structure that can be used in forming the constructs disclosed herein is as follows:

[chemical structure]

To conjugate the tri-alkyne linker to the annealed duplex, amine-functionalized duplex was dissolved in 90% DMSO/10% H₂O, at ˜50-70 mg/mL. 40 equivalents triethylamine was added, followed by 3 equivalents tri-alkyne-PNP. Once complete, the conjugate was precipitated twice in a solvent system of 1× phosphate buffered saline/acetonitrile (1:14 ratio), and dried.

### F. Synthesis of Targeting Ligand SM6.1

### ((S)-3-(4-(4-((14-azido-3,6,9,12-tetraoxatetradecyl)oxy)naphthalen-1-yl)phenyl)-3-(2-(4-((4-methylpyridin-2-yl)amino)butanamido)acetamido)propanoic Acid)

[chemical structure]

[0287] Compound 5 (tert-Butyl(4-methylpyridin-2-yl)carbamate) (0.501 g, 2.406 mmol, 1 equiv.) was dissolved in DMF (17 mL). To the mixture was added NaH (0.116 mg, 3.01 mmol, 1.25 eq, 60% dispersion in oil) The mixture stirred for 10 min before adding Compound 20 (Ethyl 4-Bromobutyrate (0.745 g, 3.82 mmol, 0.547 mL)) (Sigma 167118). After 3 hours the reaction was quenched with ethanol (18 mL) and concentrated. The concentrate was dissolved in DCM (50 mL) and washed with saturated aq. NaCl solution (1×50 mL), dried over Na₂SO₄, filtered and concentrated. The product was purified on silica column, gradient 0-5% Methanol in DCM.

[chemical structure]

[0288] Compound 21 was dissolved (0.80 g, 2.378 mmol) in 100 mL of Acetone:0.1 M NaOH [1:1]. The reaction was monitored by TLC (5% ethyl acetate in hexane). The organics were concentrated away, and the residue was acidified to pH 3-4 with 0.3 M Citric Acid (40 mL). The product was extracted with DCM (3×75 mL). The organics were pooled, dried over Na₂SO₄, filtered and concentrated. The product was used without further purification.

[chemical structure]

[0289] To a solution of Compound 22 (1.1 g, 3.95 mmol, 1 equiv.), Compound 45 (595 mg, 4.74 mmol, 1.2 equiv.), and TBTU (1.52 g, 4.74 mmol, 1.2 equiv.) in anhydrous DMF (10 mL) was added diisopropylethylamine (2.06 mL, 11.85 mmol, 3 equiv.) at 0° C. The reaction mixture was warmed to room temperature and stirred 3 hours. The reaction was quenched by saturated NaHCO₃ solution (10 mL). The aqueous phase was extracted with ethyl acetate (3×10 mL) and the organic phase was combined, dried over anhydrous Na₂SO₄, and concentrated. The product was separated by CombiFlash® using silica gel as the stationary phase. LC-MS: calculated [M+H]+ 366.20. found 367.

[chemical structure]

[0290] To a solution of compound 61 (2 g, 8.96 mmol, 1 equiv.), and compound 62 (2.13 ML, 17.93 mmol, 2 equiv.) in anhydrous DMF (10 mL) was added K₂CO₃ (2.48 g, 17.93 mmol, 2 equiv.) at 0° C. The reaction mixture was warmed to room temperature and stirred overnight. The reaction was quenched by water (10 mL). The aqueous phase was extracted with ethyl acetate (3×10 mL) and the organic phase was combined, dried over anhydrous Na₂SO₄, and concentrated. The product was separated by CombiFlash® using silica gel as the stationary phase.

[chemical structure]

[0291] To a solution of compound 60 (1.77 g, 4.84 mmol, 1 equiv.) in THF (5 mL) and H₂O (5 mL) was added lithium hydroxide monohydrate (0.61 g, 14.53 mmol, 3 equiv.) portion-wise at 0° C. The reaction mixture was warmed to room temperature. After stirring at room temperature for 3 hours, the reaction mixture was acidified by HCl (6 N) to pH 3.0. The aqueous phase was extracted with ethyl acetate (3×20 mL) and the organic layer was combined, dried over Na₂SO₄, and concentrated. LC-MS: calculated [M+H]+ 352.18. found 352.

[chemical structure]

[0292] To a solution of compound 63 (1.88 g, 6.0 mmol, 1.0 equiv.) in anhydrous THF (20 mL) was added n-BuLi in hexane (3.6 mL, 9.0 mmol, 1.5 equiv.) drop-wise at −78° C. The reaction was kept at −78° C. for another 1 hour. Triisopropylborate (2.08 mL, 9.0 mmol, 1.5 equiv.) was then added into the mixture at −78° C. The reaction was then warmed up to room temperature and stirred for another 1 hour. The reaction was quenched by saturated NH₄Cl solution (20 mL) and the pH was adjusted to 3. The aqueous phase was extracted with EtOAc (3×20 mL) and the organic phase was combined, dried over Na₂SO₄, and concentrated.

[chemical structure]

[0293] Compound 12 (300 mg, 0.837 mmol, 1.0 equiv.), Compound 65 (349 mg, 1.256 mmol, 1.5 equiv.), XPhos Pd G2 (13 mg, 0.0167 mmol, 0.02 equiv.), and K₃PO₄ (355 mg, 1.675 mmol, 2.0 equiv.) were mixed in a round-bottom flask. The flask was sealed with a screw-cap septum, and then evacuated and backfilled with nitrogen (this process was repeated a total of 3 times). Then, THF (8 mL) and water (2 mL) were added via syringe. The mixture was bubbled with nitrogen for 20 min and the reaction was kept at room temperature for overnight. The reaction was quenched with water (10 mL), and the aqueous phase was extracted with ethyl acetate (3×10 mL). The organic phase was dried over Na₂SO₄, concentrated, and purified via CombiFlash® using silica gel as the stationary phase and was eluted with 15% EtOAc in hexane. LC-MS: calculated [M+H]+ 512.24. found 512.56.

[chemical structure]

[0294] Compound 66 (858 mg, 1.677 mmol, 1.0 equiv.) was cooled by ice bath. HCl in dioxane (8.4 mL, 33.54 mmol, 20 equiv.) was added into the flask. The reaction was warmed to room temperature and stirred for another 1 hr. The solvent was removed by rotary evaporator and the product was directly used without further purification. LC-MS: calculated [M+H]+ 412.18. found 412.46.

[chemical structure]

[0295] To a solution of compound 64 (500 mg, 1.423 mmol, 1 equiv.), compound 67 (669 mg, 1.494 mmol, 1.05 equiv.), and TBTU (548 mg, 0.492 mmol, 1.2 equiv.) in anhydrous DMF (15 mL) was added diisopropylethylamine (0.744 mL, 4.268 mmol, 3 equiv.) at 0° C. The reaction mixture was warmed to room temperature and stirred for another 1 hr. The reaction was quenched by saturated NaHCO₃ aqueous solution (10 mL) and the product was extracted with ethyl acetate (3×20 mL). The organic phase was combined, dried over Na₂SO₄, and concentrated. The product was purified by CombiFlash® using silica gel as the stationary phase and was eluted with 3-4% methanol in DCM. The yield was 96.23%. LC-MS: calculated [M+H]+ 745.35. found 746.08.

[chemical structure]

[0296] To a solution of compound 68 (1.02 g, 1.369 mmol, 1 equiv.) in ethyl acetate (10 mL) was added 10% Pd/C (0.15 g, 50% H₂O) at room temperature. The reaction mixture was warmed to room temperature and the reaction was monitored by LC-MS. The reaction was kept at room temperature overnight. The solids were filtered through Celite® and the solvent was removed by rotary evaporator. The product was directly used without further purification. LC-MS: [M+H]+ 655.31. found 655.87.

[chemical structure]

[0297] To a solution of compound 69 (100 mg, 0.152 mmol, 1 equiv.) and azido-PEG₅-OTs (128 mg, 0.305 mmol, 2 equiv.) in anhydrous DMF (2 mL) was added K₂CO₃ (42 mg, 0.305 mmol, 2 equiv.) at 0° C. The reaction mixture was stirred for 6 hours at 80° C. The reaction was quenched by saturated NaHCO₃ solution and the aqueous layer was extracted with ethyl acetate (3×10 mL). The organic phase was combined, dried over Na₂SO₄, and concentrated. LC-MS: calculated [M+H]+ 900.40. found 901.46.

[chemical structure]

[0298] To a solution of compound 72 (59 mg, 0.0656 mmol, 1.0 equiv.) in THF (2 mL) and water (2 mL) was added lithium hydroxide (5 mg, 0.197 mmol, 3.0 equiv.) at room temperature. The mixture was stirred at room temperature for another 1 hr. The pH was adjusted to 3.0 by HCl (6N) and the aqueous phase was extracted with EtOAc (3×10 mL). The organic phase was combined, dried over Na₂SO₄, and concentrated. TFA (0.5 mL) and DCM (0.5 mL) was added into the residue and the mixture was stirred at room temperature for another 3 hr. The solvent was removed by rotary evaporator. LC-MS: calculated [M+H]+ 786.37. found 786.95.

### G. Synthesis of TriAlk 14

[0299] TriAlk14 and (TriAlk14)s as shown in Table 11, above, may be synthesized using the synthetic route shown below. Compound 14 may be added to the sense strand as a phosphoramidite using standard oligonucleotide synthesis techniques, or compound 22 may be conjugated to the sense strand comprising an amine in an amide coupling reaction.

[chemical structure]

[0300] To a 3-L jacketed reactor was added 500 mL DCM and 4 (75.0 g, 0.16 mol). The internal temperature of the reaction was cooled to 0° C. and TBTU (170.0 g, 0.53 mol) was added. The suspension was then treated with the amine 5 (75.5 g, 0.53 mol) dropwise keeping the internal temperature less than 5° C. The reaction was then treated with DIPEA (72.3 g, 0.56 mol) slowly, keeping the internal temperature less than 5° C. After the addition was complete, the reaction was warmed up to 23° C. over 1 hour, and allowed to stir for 3 hours. A 10% kicker charge of all three reagents were added and allowed to stir an additional 3 hours. The reaction was deemed complete when <1% of 4 remained. The reaction mixture was washed with saturated ammonium chloride solution (2×500 mL) and once with saturated sodium bicarbonate solution (500 mL). The organic layer was then dried over sodium sulfate and concentrated to an oil. The mass of the crude oil was 188 g which contained 72% 6 by QNMR The crude oil was carried to the next step. Calculated mass for C₄₆H₆₀N₄O₁₁=845.0 m/z. Found [M+H]=846.0.

[chemical structure]

[0301] The 121.2 g of crude oil containing 72 wt % compound 6 (86.0 g, 0.10 mol) was dissolved in DMF (344 mL) and treated with TEA (86 mL, 20 v/v %), keeping the internal temperature below 23° C. The formation of dibenzofulvene (DBF) relative to the consumption of Fmoc-amine 6 was monitored via HPLC method 1 (FIG. 2) and the reaction was complete within 10 hours. To the solution was added glutaric anhydride (12.8 g, 0.11 mol) and the intermediate amine 7 was converted to compound 8 within 2 hours. Upon completion, the DMF and TEA were removed at 30° C. under reduced pressure resulting in 100 g of a crude oil. Due to the high solubility of compound 7 in water, an aqueous workup could not be used, and chromatography is the only way to remove DBF, TMU, and glutaric anhydride. The crude oil (75 g) was purified on a Teledyne ISCO Combi-Flash® purification system in three portions. The crude oil (25 g) was loaded onto a 330 g silica column and eluted from 0-20% methanol/DCM over 30 minutes resulting in 42 g of compound 8 (54% yield over 3 steps). Calculated mass for C₃₆H₅₅N₄O₁₂=736.4 m/z. Found [M+H]=737.0.

[chemical structure]

[0302] Compound 8 (42.0 g, 0.057 mol) was co-stripped with 10 volumes of acetonitrile prior to use to remove any residual methanol from chromatography solvents. The oil was redissolved in DMF (210 mL) and cooled to 0° C. The solution was treated with 4-nitrophenol (8.7 g, 0.063 moL) followed by EDC-hydrochloride (12.0 g, 0.063 mol) and found to reach completion within 10 hours. The solution was cooled to 0° C. and 10 volumes ethyl acetate was added followed by 10 volumes saturated ammonium chloride solution, keeping the internal temperature below 15° C. The layers were allowed to separate and the ethyl acetate layer was washed with brine. The combined aqueous layers were extracted twice with 5 volumes ethyl acetate. The combined organic layers were dried over sodium sulfate and concentrated to an oil. The crude oil (55 g) was purified on a Teledyne ISCO Combi-Flash® purification system in three portions. The crude oil (25 g) was loaded onto a 330 g silica column and eluted from 0-10% methanol/DCM over 30 minutes resulting in 22 g of pure 9 (Compound 22) (50% yield). Calculated mass for C₄₂H₅₉N₅O₁₄=857.4 m/z. Found [M+H]=858.0.

[chemical structure]

[0303] A solution of ester 9 (49.0 g, 57.1 mmol) and 6-amino-1-hexanol (7.36 g, 6.28 mmol) in dichloromethane (3 volumes) was treated with triethylamine (11.56 g, 111.4 mmol) dropwise. The reaction was monitored by observing the disappearance of compound 9 on HPLC Method 1 and was found to be complete in 10 minutes. The crude reaction mixture was diluted with 5 volumes dichloromethane and washed with saturated ammonium chloride (5 volumes) and brine (5 volumes). The organic layer was dried over sodium sulfate and concentrated to an oil. The crude oil was purified on a Teledyne ISCO Combi-Flash® purification system using a 330 g silica column. The 4-nitrophenol was eluted with 100% ethyl acetate and 10 was flushed from the column using 20% methanol/DCM resulting in a colorless oil (39 g, 81% yield). Calculated mass for C₄₂H₆₉N₅O₁₂=836.0 m/z. Found [M+H]837.0.

[chemical structure]

[0304] Alcohol 10 was co-stripped twice with 10 volumes of acetonitrile to remove any residual methanol from chromatography solvents and once more with dry dichloromethane (KF<60 ppm) to remove trace water. The alcohol 10 (2.30 g, 2.8 mmol) was dissolved in 5 volumes dry dichloromethane (KF<50 ppm) and treated with diisopropylammonium tetrazolide (188 mg, 1.1 mmol). The solution was cooled to 0° C. and treated with 2-cyanoethyl N,N,N′,N′-tetraisopropylphosphoramidite (1.00 g, 3.3 mmol) dropwise. The solution was removed from ice-bath and stirred at 20° C. The reaction was found to be complete within 3-6 hours. The reaction mixture was cooled to 0° C. and treated with 10 volumes of a 1:1 solution of saturated ammonium bicarbonate/brine and then warmed to ambient over 1 minute and allowed to stir an additional 3 minutes at 20° C. The biphasic mixture was transferred to a separatory funnel and 10 volumes of dichloromethane was added. The organic layer was separated and washed with 10 volumes of saturated sodium bicarbonate solution to hydrolyze unreacted bis-phosphorous reagent. The organic layer was dried over sodium sulfate and concentrated to an oil resulting in 3.08 g of 94 wt % Compound 14. Calculated mass for C₅₁H₈₆N₇O₁₃P=1035.6 m/z. Found [M+H]=1036.

[0305] H. Conjugation of Targeting Ligands. Either prior to or after annealing, the 5′ or 3′ tridentate alkyne functionalized sense strand is conjugated to targeting ligands. The following example describes the conjugation of targeting ligands to the annealed duplex: Stock solutions of 0.5M Tris(3-hydroxypropyltriazolylmethyl)amine (THPTA), 0.5M of Cu(II) sulfate pentahydrate (Cu(II)SO₄·5H₂O) and 2M solution of sodium ascorbate were prepared in deionized water. A 75 mg/mL solution in DMSO of targeting ligand was made. In a 1.5 mL centrifuge tube containing tri-alkyne functionalized duplex (3 mg, 75 μL, 40 mg/mL in deionized water, ˜15,000 g/mol), 25 μL of 1M Hepes pH 8.5 buffer is added. After vortexing, 35 μL of DMSO was added and the solution is vortexed. Targeting ligand was added to the reaction (6 equivalents/duplex, 2 equivalents/alkyne, ˜15 μL) and the solution is vortexed. Using pH paper, pH was checked and confirmed to be pH˜8. In a separate 1.5 mL centrifuge tube, 50 μL of 0.5M THPTA was mixed with 10 μL of 0.5M Cu(II)SO₄·5H₂O, vortexed, and incubated at room temp for 5 min. After 5 min, THPTA/Cu solution (7.2 μL, 6 equivalents 5:1 THPTA:Cu) was added to the reaction vial, and vortexed. Immediately afterwards, 2M ascorbate (5 μL, 50 equivalents per duplex, 16.7 per alkyne) was added to the reaction vial and vortexed. Once the reaction was complete (typically complete in 0.5-1h), the reaction was immediately purified by non-denaturing anion exchange chromatography.

### Example 2. In Vivo Anti-Inflammatory Effect of TSLP Knock-Down in Rat Model of Airway Inflammation, Delivery Via Intra-Tracheal Microsprayer

[0306] On study day 1 and day 3, male Sprague Dawley rats were administered a dose of 5 mg/kg of a rat-specific RNAi agent linked to a Tri-SM6.1-αvβ6 integrin targeting ligand (referred to as AC001714), or saline vehicle. Volume of 200 μL was loaded into a syringe that was connected to a microsprayer device (Penn Century, Philadelphia, PA) for intra-tracheal administration.

[0307] AC001714 includes a rat-specific sequence designed to target the rat TSLP transcript (NCBI GenBank XM_008772052.2) and does not have homology with the human TSLP gene, and was chemically modified as follows:

Modified Sense Strand (5′→3′):
(SEQ ID NO: 782)
Tri-SM6.1-avb6-(TA14)-
gsa_2NaucaaaCfCfUfcacaaauucus(invAb)
Modified Antisense Strand (5′→3′):
(SEQ ID NO: 587)
cPrpasGfsasAfuUfuGfuGfaGfgUfuUfgAfuUfsc

[0308] On day 14, rats were challenged with a single intra-tracheal dose of 400 μg/rat of Alternaria alternata prepared in phosphate buffered saline (PBS). Rats in Group 1 were administered only with PBS as control.

TABLE 12
Rat-specific TSLP RNAi Agent and Dosing for Example 2.

| | AC | Animals | Harvest/ |
|---|---|---|---|
| | Duplex | per | Sacrifice |
| Group ID | Number | Group | Day |
| Group 1 (saline IT days 1, 3) (PBS IT day 14) | N/A | 4 | Day 15 |
| Group 2 (saline IT days 1, 3) (Alternaria | N/A | 7 | Day 15 |
| IT day 14) | | | |
| Group 3 (saline IT days 1, 3) (Alternaria | N/A | 7 | Day 16 |
| IT day 14) | | | |
| Group 4 (saline IT days 1, 3) (Alternaria | N/A | 5 | Day 17 |
| IT day 14) | | | |
| Group 5 (IT dose 5.0 mg/kg AC001714 on days | AC001714 | 7 | Day 15 |
| 1, 3)/(Alternaria IT day 14) | | | |
| Group 6 (IT dose 5.0 mg/kg AC001714 on days | AC001714 | 5 | Day 16 |
| 1, 3)/(Alternaria IT day 14) | | | |
| Group 7 (IT dose 5.0 mg/kg AC001714 on days | AC001714 | 5 | Day 17 |
| 1, 3)/(Alternaria IT day 14) | | | |

[0309] After either 24, 48, or 72 hours post-administration of the Alternaria (i.e., either day 15, 16, or 17), rats were anesthetized with isoflurane/02, blood was drawn, and were euthanized by exsanguination. Days of sacrifice/euthanasia are shown in Table 12 above. Trachea was canulated and bronchoalveolar lavage (BAL) collected after washing with 2×5 mL of ice-cold PBS. BAL samples were spun down, cells resuspended with 1 mL of ice-cold PBS, and aliquot was mixed with Turk's solution (ratio 1:1), and total cell counted via hemocytomers. Cytospins were prepared, stained and differential cell counting performed. Supernatant was used for cytokine measurements. Right lung lobes were used to determine rTSLP mRNA expression and left lung lobes were collected in 4% PFA/PBS for histology (Trichrome and Sirius Red Staining, RNAscope).

[0310] Rat TSLP mRNA expression was quantitated by probe-based quantitative PCR, normalized to rat B2M expression, and expressed as fraction of vehicle control group (geometric mean, +/−95% confidence interval).

TABLE 13
Average Relative Rat TSLP mRNA Expression at Sacrifice
(i.e., Day 15, 16, or 17) in Example 2

| | Average Relative rTSLP | Low | High |
|---|---|---|---|
| Group ID | mRNA Expression | (error) | (error) |
| Group 1 (saline IT days 1, 3) (PBS IT day 14) | 1.000 | 0.228 | 0.296 |
| Group 2 (saline IT days 1, 3) (Alternaria IT | 0.787 | 0.149 | 0.183 |
| day 14) | | | |
| Group 3 (saline IT days 1, 3) (Alternaria IT | 1.072 | 0.151 | 0.176 |
| day 14) | | | |
| Group 4 (saline IT days 1, 3) (Alternaria IT | 0.828 | 0.121 | 0.142 |
| day 14) | | | |
| Group 5 (IT dose 5.0 mg/kg AC001714 on | 0.387 | 0.098 | 0.131 |
| days 1, 3)/(Alternaria IT day 14) | | | |
| Group 6 (IT dose 5.0 mg/kg AC001714 on | 0.379 | 0.102 | 0.139 |
| days 1, 3)/(Alternaria IT day 14) | | | |
| Group 7 (IT dose 5.0 mg/kg AC001714 on | 0.459 | 0.095 | 0.121 |
| days 1, 3)/(Alternaria IT day 14) | | | |

[0311] As shown in Table 13 above, the Groups administered AC001714 (i.e., Groups 5, 6 and 7) each showed reductions of approximately 45-65% of rTSLP mRNA at the respective time of sacrifice relative to the respective control groups (Groups 2, 3, and 4).

[0312] Granulocytes (both eosinophils and neutrophils) are well known markers for cellular inflammation. For the BAL samples, the total and differential cells were counted and the number of inflammatory cells were derived. The impact of rTSLP inhibition by the rat-specific TSLP RNAi agents disclosed herein on eosinophilic inflammation induced by Alternaria extract was assessed. Groups 5-7 (treated with rat-specific TSLP RNAi agent) showed significant reductions of total BAL cell counts, lymphocytes, and neutrophils across all time points when compared to their respective control. Further, a significant reduction of eosinophils at the 72 hour time point (Group 7) was observed as compared to Group 4. Moreover, BAL total protein was significantly reduced at both 24 hour and 72 hour time points (Group 5 and 7) as compared to control groups 2 and 4 respectively.

[0313] Other biomarkers, such as IL-18 and VEGF, are also indicative of cellular inflammation. For the Alternaria challenged groups, administration of the rat-specific RNAi agent (Groups 5, 6 and 7) resulted in a reductions of each of these pro-inflammatory biomarkers compared to the group in which no RNAi agent was administered. This study provides physiological support in a rat model that a reduction in TSLP gene expression of approximately 45% or more can provide a phenotype improvement to reduce pulmonary inflammation, and thus can potentially treat diseases such as allergic asthma.

### Example 3. In Vivo Anti-Inflamatory Effect of TSLP Knock-Down in Rat Model of Airway Inflammation, Delivery Via Intra-Tracheal Microsprayer

[0314] On study day 1 and day 3, male Brown-Norway rats were administered a dose of 5 mg/kg of a rat-specific RNAi agent linked to a Tri-SM6.1-αvβ6 integrin targeting ligand (referred to as AC001714 or AC002515), or saline vehicle. Additionally, a “RISC-blocked” RNAi trigger was used, which include a construct similar to AC001714, including the same targeting ligand, but included chemical modifications designed to prevent the loading of the antisense strand into RISC, thus serving as a negative control. Volume of 200 μL was loaded into a syringe that was connected to a microsprayer device (Penn Century, Philadelphia, PA) for intra-tracheal administration.

[0315] AC001714 includes a rat-specific sequence designed to target the rat TSLP transcript (NCBI GenBank XM_008772052.2) and does not have homology with the human TSLP gene, the chemical structure of which is shown above in Example 2.

[0316] AC002515 is also a rat-specific sequence designed to target a different position on the rat TSLP transcript (NCBI GenBank XM_008772052.2) that does not have homology with the human TSLP gene, and was chemically modified as follows:

Modified Sense Strand (5′→3′):
(SEQ ID NO: 783)
Tri-SM6.1-avb6-(TA14)-csugaaacuGfAfGfagaaaugguas
(invAb)
Modified Antisense Strand (5′→3′):
(SEQ ID NO: 588)
cPrpusAfscsCfaUfuucucUfcAfgUfuUfcasg

[0317] On day 14, rats were challenged with a single intra-tracheal dose of 500 μg/rat of Alternaria alternata prepared in PBS. Rats in Group 1 were administered only with PBS as a control.

TABLE 14
Rat-specific TSLP RNAi Agent and Dosing for Example 3.

| | AC | Animals | Harvest/ |
|---|---|---|---|
| | Duplex | per | Sacrifice |
| Group ID | Number | Group | Day |
| Group 1 (saline IT days 1, 3) (PBS IT day 15) | N/A | 6 | Day 16 |
| Group 2 (saline IT days 1, 3) (Alternaria IT | N/A | 6 | Day 16 |
| day 15) | | | |
| Group 3 (saline IT days 1, 3) (IT dose 5.0 | RISC-blocked | 6 | Day 16 |
| mg/kg RISC-blocked trigger on days 1, 3)/ | RNAi Trigger | | |
| (Alternaria IT day 15) | | | |
| Group 4 (IT dose 5.0 mg/kg AC001714 on days | AC001714 | 7 | Day 16 |
| 1, 3)/(Alternaria IT day 15) | | | |
| Group 5 (IT dose 5.0 mg/kg AC002515 on days | AC002515 | 7 | Day 16 |
| 1, 3)/(Alternaria IT day 15) | | | |

[0318] After 24 hours post-administration of the Alternaria (i.e., day 16), rats were anesthetized with isoflurane/02, blood was drawn, and were euthanized by exsanguination. Days of sacrifice/euthanasia are shown in Table 14 above. Trachea was canulated and bronchoalveolar lavage (BAL) collected after washing with 2×5 mL of ice-cold PBS. BAL samples were spun down, cells resuspended with 1 mL of ice-cold PBS, and aliquot was mixed with Turk's solution (ratio 1:1), and total cell counted via hemocytomers. Cytospins were prepared, stained and differential cell counting performed. Supernatant was used for cytokine measurements. Right lung lobes were used to determine rTSLP mRNA expression and left lung lobes were collected in 4% PFA/PBS for histology (Trichrome and Sirius Red Staining, RNAscope).

[0319] Rat TSLP mRNA expression was quantitated by probe-based quantitative PCR, normalized to rat B2M expression, and expressed as fraction of vehicle control group (geometric mean, +/−95% confidence interval).

TABLE 15
Average Relative Rat TSLP mRNA Expression
at Sacrifice (i.e., Day 16) in Example 3

| | Average Relative rTSLP | Low | High |
|---|---|---|---|
| Group ID | mRNA Expression | (error) | (error) |
| Group 1 (saline IT days 1, 3) (PBS IT day | 1.232 | 0.224 | 0.273 |
| 15) | | | |
| Group 2 (saline IT days 1, 3) (Alternaria | 1.000 | 0.143 | 0.167 |
| IT day 15) | | | |
| Group 3 (saline IT days 1, 3) (IT dose 5.0 | 0.953 | 0.144 | 0.170 |
| mg/kg RISC-blocked trigger on days 1, 3)/ | | | |
| (Alternaria IT day 15) | | | |
| Group 4 (IT dose 5.0 mg/kg AC001714 on | 0.382 | 0.109 | 0.153 |
| days 1, 3)/(Alternaria IT day 15) | | | |
| Group 5 (IT dose 5.0 mg/kg AC002515 on | 0.598 | 0.096 | 0.115 |
| days 1, 3)/(Alternaria IT day 15) | | | |

[0320] As shown in Table 15 above, the Groups administered AC001714 (Group 4) and AC002515 (Group 5) each showed reductions of TSLP mRNA, with AC001714 showing approximately 62% inhibition. This is also shown in FIG. 6A.

[0321] IL-13 and IL-33 are Th2 cytokines that are known indicators for inflammation in the lung. Rat IL-13 mRNA expression and Rat IL-33 mRNA expression were similarly quantitated by probe-based quantitative PCR, normalized to rat B2M expression, and expressed as fraction of vehicle control group (geometric mean, +/−95% confidence interval).

TABLE 16
Average Relative Rat IL-13 mRNA Expression
at Sacrifice (i.e., Day 16) in Example 3

| | Average Relative rIL-13 | Low | High |
|---|---|---|---|
| Group ID | mRNA Expression | (error) | (error) |
| Group 1 (saline IT days 1, 3) (PBS IT day | 1.000 | 0.279 | 0.387 |
| 15) | | | |
| Group 2 (saline IT days 1, 3) (Alternaria | 4.018 | 2.735 | 8.564 |
| IT day 15) | | | |
| Group 3 (saline IT days 1, 3) (IT dose 5.0 | 10.727 | 4.676 | 8.290 |
| mg/kg RISC-blocked trigger on days 1, 3)/ | | | |
| (Alternaria IT day 15) | | | |
| Group 4 (IT dose 5.0 mg/kg AC001714 on | 1.637 | 0.856 | 1.793 |
| days 1, 3)/(Alternaria IT day 15) | | | |
| Group 5 (IT dose 5.0 mg/kg AC002515 on | 1.151 | 0.652 | 1.506 |
| days 1, 3)/(Alternaria IT day 15) | | | |

TABLE 17
Average Relative Rat IL-33 mRNA Expression
at Sacrifice (i.e., Day 16) in Example 3

| | Average Relative rIL-33 | Low | High |
|---|---|---|---|
| Group ID | mRNA Expression | (error) | (error) |
| Group 1 (saline IT days 1, 3) (PBS IT day | 1.000 | 0.286 | 0.401 |
| 15) | | | |
| Group 2 (saline IT days 1, 3) (Alternaria | 1.366 | 0.395 | 0.556 |
| IT day 15) | | | |
| Group 3 (saline IT days 1, 3) (IT dose 5.0 | 1.710 | 0.215 | 0.246 |
| mg/kg RISC-blocked trigger on days 1, 3)/ | | | |
| (Alternaria IT day 15) | | | |
| Group 4 (IT dose 5.0 mg/kg AC001714 on | 0.848 | 0.297 | 0.458 |
| days 1, 3)/(Alternaria IT day 15) | | | |
| Group 5 (IT dose 5.0 mg/kg AC002515 on | 0.792 | 0.172 | 0.220 |
| days 1, 3)/(Alternaria IT day 15) | | | |

[0322] As shown in Tables 16 and 17 above, the Groups administered AC001714 (Group 4) and AC002515 (Group 5) that were challenged with Alternaria each showed cytokine levels that were maintained to levels similar to the untreated group (Group 1) that was not challenged, indicating a preventative effect. In contrast, both the Alternaria group without an RNAi treatment (Group 2) and the Alternaria group with a RISC-blocked RNAi trigger that is unable to inhibit rTSLP gene expression both showed marked increases in IL-13 and IL-33, indicative of lung inflammation. This IL-13 mRNA levels are also shown in FIG. 6B, and IL-33 shown in FIG. 6C.

[0323] Further, as noted in the prior Example, granulocytes (both eosinophils and neutrophils) are well known markers for cellular inflammation. For the BAL samples, the total and differential cells were counted and the number of inflammatory cells were derived. The impact of rTSLP inhibition by the rat-specific TSLP RNAi agents disclosed herein on eosinophilic inflammation induced by Alternaria extract was assessed. Groups 4 and 5 (treated with rat-specific TSLP RNAi agent) showed significant reductions of lymphocytes. The negative control group (Group 3) showed no such changes, confirming that the reductions are due to the reductions in TSLP mRNA. Further, a trend of reduction of BAL total protein, eosinophils, and total BAL cell counts was observed only in the two treatment Groups (Groups 4 and 5). Furthermore, soluble collagen content was significantly reduced in the two treatment Groups (Groups 4 and 5) relative to the Alternaria control (Group 2).

[0324] Other biomarkers, such as IL-13, IL-5, Leptin, MCP-1, RATES, TNF-alpha, and IP-10 are also indicative of cellular inflammation. For the Alternaria challenged groups, administration of the rat-specific RNAi agent (Group 4 and 5) resulted in a trend showing reductions of each of these pro-inflammatory biomarkers compared to the group in which no RNAi agent was administered (Group 2) and the negative control trigger group (Group 3).

[0325] As shown in FIG. 6D, rat-specific TSLP RNAi agents achieved significant reduction in BAL soluble collagen (Groups 4 and 5) in comparison with no RNAi agent Alternaria control group (Group 2) as well as negative control RISC-blocked Alternaria group (Group 3). Statistical significance is denoted * p-value is p<0.05.

[0326] As shown in FIG. 6E (BAL IL-5) and FIG. 6F (BAL IL-13), rat-specific TSLP RNAi agents (Groups 4 and 5) also achieved reduction of IL-5 and IL-13 in comparison with no RNAi agent Alternaria control group (Group 2) as well as negative control RISC-blocked Alternaria group (Group 3).

[0327] Duplex RNAscope of TSLP and ITGB6 confirmed TSLP is expressed in airway epithelium. Co-staining of TSLP RNAscope and Sftpc IHC demonstrated TSLP expression in alveolar type 2 cells.

### Example 4. AAV9-CAG-hTSLP AAV Mouse Model

[0328] The following procedure was used to evaluate TSLP RNAi agents in an AAV mouse model. To evaluate certain TSLP RNAi agents, an AAV9-CAG-hTSLP (Adeno-associated virus) mouse model was used. The transgenic sequence included human TSLP CDS with 3′UTR. Six- to eight-week-old female C57BL/6 mice were transduced with human TSLP using AAV with serotype 9 (specifically, AAV9-CAG-hTSLP) and eGFP using AAV9-CAG-eGFP. Mice were intratracheally administered AAV several weeks prior to intracheal administration of either TSLP RNAi agents or control. The genome of the AAV9-CAG-hTSLP. UTRs construct contains the human TSLP cDNA sequence (GenBank NM_033035.5). eGFP was used as a control to normalize human TSLP mRNA expression by qPCR. 2e10 GC of the respective AAV mixed in PBS in a total volume of 50 μL was intratracheally (IT) delivered into mice to create AAV-hTSLP model mice. Lung tissues were collected 2-3 weeks after the administration of RNAi agents.

[0329] The human TSLP mRNA expression was measured in the lung tissues by qPCR.

[0330] At day 1 and Day 3, each mouse was given an intratracheal (IT) administration of 50 μL AAV solutions containing 2e10 GC (genome copy) of AAV9-CAG-eGFP and 2e10 GC of AAV9-CAG-hTSLP in PBS, or vehicle control (PBS). At Day 30 and 31, each mouse was given intratracheal administration of 50 μL of different dose levels of TSLP RNAi agents formulated in isotonic saline, or vehicle control (isotonic saline with no RNAi agent), according to the following Table 18. The mice were humanely sacrificed and harvested on Day 44.

TABLE 18
Targeted Positions and Dosing Groups of Example 4.

| | Targeted TSLP | | | |
|---|---|---|---|---|
| | Gene Position | | | |
| | (within SEQ ID | | RNAi Agent | |
| | NO: 1, GenBank | AAV dose | and Dose | |
| Group | NM_033035.5) | (Day 1, 3) | (Day 30, 31) | Dosing Regimen |
| 1 | N/A | PBS | Saline (no RNAi | IT doses of PBS on |
| | | | agent) | Day 1, 3; |
| | | | | IT doses of saline on |
| | | | | day 30, 31 |
| 2 | N/A | 2e10 GC of AAV9- | Saline (no RNAi | IT doses of AAV on |
| | | CAG-eGFP and | agent) | Day 1, 3; |
| | | 2e10 GC of AAV9- | | IT doses of saline on |
| | | CAG-hTSLP | | day 30, 31 |
| 3 | 398 | 2e10 GC of AAV9- | 0.5 mg/kg | IT doses of AAV on |
| | | CAG-eGFP and | AC003096 | Day 1, 3; |
| | | 2e10 GC of AAV9- | | IT doses of RNAi |
| | | CAG-hTSLP | | agent on day 30, 31 |
| 4 | 410 | 2e10 GC of AAV9- | 0.5 mg/kg | IT doses of AAV on |
| | | CAG-eGFP and | AC003097 | Day 1, 3; |
| | | 2e10 GC of AAV9- | | IT doses of RNAi |
| | | CAG-hTSLP | | agent on day 30, 31 |
| 5 | 515 | 2e10 GC of AAV9- | 0.5 mg/kg | IT doses of AAV on |
| | | CAG-eGFP and | AC003098 | Day 1, 3; |
| | | 2e10 GC of AAV9- | | IT doses of RNAi |
| | | CAG-hTSLP | | agent on day 30, 31 |
| 6 | 570 | 2e10 GC of AAV9- | 0.5 mg/kg | IT doses of AAV on |
| | | CAG-eGFP and | AC003099 | Day 1, 3; |
| | | 2e10 GC of AAV9- | | IT doses of RNAi |
| | | CAG-hTSLP | | agent on day 30, 31 |
| 7 | 571 | 2e10 GC of AAV9- | 0.5 mg/kg | IT doses of AAV on |
| | | CAG-eGFP and | AC003100 | Day 1, 3; |
| | | 2e10 GC of AAV9- | | IT doses of RNAi |
| | | CAG-hTSLP | | agent on day 30, 31 |
| 8 | 568 | 2e10 GC of AAV9- | 0.5 mg/kg | IT doses of AAV on |
| | | CAG-eGFP and | AC003101 | Day 1, 3; |
| | | 2e10 GC of AAV9- | | IT doses of RNAi |
| | | CAG-hTSLP | | agent on day 30, 31 |
| 9 | 520 | 2e10 GC of AAV9- | 0.5 mg/kg | IT doses of AAV on |
| | | CAG-eGFP and | AC003128 | Day 1, 3; |
| | | 2e10 GC of AAV9- | | IT doses of RNAi |
| | | CAG-hTSLP | | agent on day 30, 31 |
| 10 | 413 | 2e10 GC of AAV9- | 0.5 mg/kg | IT doses of AAV on |
| | | CAG-eGFP and | AC003129 | Day 1, 3; |
| | | 2e10 GC of AAV9- | | IT doses of RNAi |
| | | CAG-hTSLP | | agent on day 30, 31 |
| 11 | 406 | 2e10 GC of AAV9- | 0.5 mg/kg | IT doses of AAV on |
| | | CAG-eGFP and | AC003130 | Day 1, 3; |
| | | 2e10 GC of AAV9- | | IT doses of RNAi |
| | | CAG-hTSLP | | agent on day 30, 31 |

[0331] Each of the TSLP RNAi agents included mod ified nucleotides that were conjugated at the 5′ terminal end of the sense strand to an αvβ6 integrin targeting ligand having the modified sequences as set forth in the duplex structures herein. (See Tables 3, 4, 5, 6, 7A, 7B, 8, 9, 10, and 11 for specific modifications and structure information related to the TSLP RNAi agents, including Tri-SM6.1-αvβ6). The TSLP RNAi agents in Groups 3-8 each included nucleotide sequences that were designed to inhibit expression of a TSLP gene by targeting specific positions of TSLP mRNA as set forth in Table 18, above. (See. e.g., SEQ ID NO:1 and Table 2 for the TSLP mRNA sequence referenced.)

[0332] Five (5) mice in each group were tested (n=5) in each group, except for Group 1 where only 4 mice were tested. TSLP mRNA expression levels were determined by qPCR Data from the experiment are shown in the following Table 19:

TABLE 19
Average Relative TSLP Normalized to Control in AAV-hTSLP Mice from Example 4.

| | Average Relative hTSLP | Low | High |
|---|---|---|---|
| Group ID | mRNA Expression | (error) | (error) |
| Group 1 (PBS IT days 1, 3) (saline IT days 30, 31) | N/A | | |
| Group 2 (AAV days 1, 3) (saline IT days 30, 31) | 1.000 | 0.097 | 0.108 |
| Group 3 (AAV IT days 1, 3) (0.5 mg/kg AC003096 IT days 30, 31) | 0.826 | 0.159 | 0.197 |
| Group 4 (AAV IT days 1, 3) (0.5 mg/kg AC003097 IT days 30, 31) | 0.737 | 0.187 | 0.250 |
| Group 5 (AAV IT days 1, 3) (0.5 mg/kg AC003098 IT days 30, 31) | 0.882 | 0.145 | 0.174 |
| Group 6 (AAV IT days 1, 3) (0.5 mg/kg AC003099 IT days 30, 31) | 0.701 | 0.050 | 0.054 |
| Group 7 (AAV IT days 1, 3) (0.5 mg/kg AC003100 IT days 30, 31) | 0.576 | 0.085 | 0.099 |
| Group 8 (AAV IT days 1, 3) (0.5 mg/kg AC003101 IT days 30, 31) | 0.930 | 0.158 | 0.191 |
| Group 9 (AAV IT days 1, 3) (0.5 mg/kg AC003128 IT days 30, 31) | 0.522 | 0.092 | 0.112 |
| Group 10 (AAV IT days 1, 3) (0.5 mg/kg AC003129 IT days 30, 31) | 0.745 | 0.093 | 0.106 |
| Group 11 (AAV IT days 1, 3) (0.5 mg/kg AC003130 IT days 30, 31) | 0.697 | 0.198 | 0.277 |

[0333] As shown in Table 19, above, the TSLP RNAi agents each showed some reductions in hTSLP expression compared to control. Of particular note, Group 7 (AC003100, targeting position 571 of the TSLP gene) showed an approximately 42% reduction (0.576) in hTSLP mRNA, and Group 9 (AC003128, targeting position 520 of the TSLP gene) showed reductions of approximately 48% (0.522) on day 44, and provided substantially more knock-down that the other TSLP RNAi agents tested.

### Example 5. AAV9-CAG-hTSLP AAV Mouse Model

[0334] To evaluate certain TSLP RNAi agents, the same AAV9-CAG-hTSLP (Adeno-associated virus) mouse model as discussed in Example 4 was used.

[0335] The human TSLP mRNA expression was measured in the mice lung tissues by qPCR

[0336] At day 1 and Day 3, each mouse was given an intratracheal (IT) administration of 50 μL AAV solutions containing 2e10 GC (genome copy) of AAV9-CAG-eGFP and 3e10 GC of AAV9-CAG-hTSLP in PBS, or vehicle control (PBS). At Day 15, each mouse was given intratracheal administration of 50 μL of different dose levels of TSLP RNAi agents formulated in isotonic saline, or vehicle control (isotonic saline with no RNAi agent), according to the following Table 20. The mice were humanely sacrificed and harvested on Day 31.

TABLE 20
Targeted Positions and Dosing Groups of Example 5.

| | Targeted TSLP | | | |
|---|---|---|---|---|
| | Gene Position | | | |
| | (within SEQ ID | | RNAi Agent | |
| | NO: 1, GenBank | AAV dose | and Dose | |
| Group | NM_033035.5) | (Day 1, 3) | (Day 15) | Dosing Regimen |
| 1 | N/A | PBS | Saline (no RNAi | IT doses of PBS on |
| | | | agent) | Day 1, 3; |
| | | | | IT dose of saline on |
| | | | | day 15 |
| 2 | N/A | 2e10 GC of AAV9- | Saline (no RNAi | IT doses of AAV on |
| | | CAG-eGFP and | agent) | Day 1, 3; |
| | | 3e10 GC of AAV9- | | IT dose of saline on |
| | | CAG-hTSLP | | day 15 |
| 3 | 571 | 2e10 GC of AAV9- | 3.0 mg/kg | IT doses of AAV on |
| | | CAG-eGFP and | AC003100 | Day 1, 3; |
| | | 3e10 GC of AAV9- | | IT dose of RNAi |
| | | CAG-hTSLP | | agent on day 15 |
| 4 | 571 | 2e10 GC of AAV9- | 1.5 mg/kg | IT doses of AAV on |
| | | CAG-eGFP and | AC003100 | Day 1, 3; |
| | | 3e10 GC of AAV9- | | IT dose of RNAi |
| | | CAG-hTSLP | | agent on day 15 |
| 5 | 571 | 2e10 GC of AAV9- | 0.75 mg/kg | IT doses of AAV on |
| | | CAG-eGFP and | AC003100 | Day 1, 3; |
| | | 3e10 GC of AAV9- | | IT dose of RNAi |
| | | CAG-hTSLP | | agent on day 15 |
| 6 | 520 | 2e10 GC of AAV9- | 3.0 mg/kg | IT doses of AAV on |
| | | CAG-eGFP and | AC003128 | Day 1, 3; |
| | | 3e10 GC of AAV9- | | IT dose of RNAi |
| | | CAG-hTSLP | | agent on day 15 |
| 7 | 520 | 2e10 GC of AAV9- | 1.5 mg/kg | IT doses of AAV on |
| | | CAG-eGFP and | AC003128 | Day 1, 3; |
| | | 3e10 GC of AAV9- | | IT dose of RNAi |
| | | CAG-hTSLP | | agent on day 15 |
| 8 | 568 | 2e10 GC of AAV9- | 0.75 mg/kg | IT doses of AAV on |
| | | CAG-eGFP and | AC003101 | Day 1, 3; |
| | | 3e10 GC of AAV9- | | IT dose of RNAi |
| | | CAG-hTSLP | | agent on day 15 |
| 9 | 570 | 2e10 GC of AAV9- | 3.0 mg/kg | IT doses of AAV on |
| | | CAG-eGFP and | AC003099 | Day 1, 3; |
| | | 3e10 GC of AAV9- | | IT dose of RNAi |
| | | CAG-hTSLP | | agent on day 15 |
| 10 | 520 | 2e10 GC of AAV9- | 3.0 mg/kg | IT doses of AAV on |
| | | CAG-eGFP and | AC003252 | Day 1, 3; |
| | | 3e10 GC of AAV9- | | IT dose of RNAi |
| | | CAG-hTSLP | | agent on day 15 |
| 11 | 520 | 2e10 GC of AAV9- | 3.0 mg/kg | IT doses of AAV on |
| | | CAG-eGFP and | AC003253 | Day 1, 3; |
| | | 3e10 GC of AAV9- | | IT dose of RNAi |
| | | CAG-hTSLP | | agent on day 15 |

[0337] Each of the TSLP RNAi agents included modified nucleotides that were conjugated at the 5′ terminal end of the sense strand to an αvβ36 integrin targeting ligand having the modified sequences as set forth in the duplex structures herein. (See Tables 3, 4, 5, 6, 7A, 7B, 8, 9, 10, and 11 for specific modifications and structure information related to the TSLP RNAi agents, including Tri-SM6.1-αvβ6). The TSLP RNAi agents in Groups 3-8 each included nucleotide sequences that were designed to inhibit expression of a TSLP gene by targeting specific positions of TSLP mRNA as set forth in Table 20, above. (See. e.g., SEQ ID NO:1 and Table 2 for the TSLP mRNA sequence referenced.)

[0338] Five (5) mice in each group were tested (n=5) in each group, except for Group 1 where only 4 mice were tested. Left lobe lungs were collected in 4% PFA for histology analysis. Lower right lobes were collected for human TSLP protein measurement by Meso Scale Discovery (MSD) Assay. All remaining right lobes were collected for TSLP mRNA expression measurement by qPCR Data from the experiment are shown in the following Table 21:

TABLE 21
Average Relative TSLP Normalized to Control in AAV-hTSLP Mice from Example 5.

| | Average Relative hTSLP | Low | High |
|---|---|---|---|
| Group ID | mRNA Expression | (error) | (error) |
| Group 1 (PBS IT days 1, 3) (saline IT day 15) | N/A | | |
| Group 2 (AAV days 1, 3) (saline IT day 15) | 1.000 | 0.077 | 0.083 |
| Group 3 (AAV IT days 1, 3) (3.0 mg/kg AC003100 IT day 15) | 0.448 | 0.077 | 0.092 |
| Group 4 (AAV IT days 1, 3) (1.5 mg/kg AC003100 IT day 15) | 0.484 | 0.055 | 0.062 |
| Group 5 (AAV IT days 1, 3) (0.75 mg/kg AC003100 IT day 15) | 0.642 | 0.078 | 0.088 |
| Group 6 (AAV IT days 1, 3) (3.0 mg/kg AC003128 IT day 15) | 0.562 | 0.098 | 0.118 |
| Group 7 (AAV IT days 1, 3) (1.5 mg/kg AC003128 IT day 15) | 0.705 | 0.149 | 0.190 |
| Group 8 (AAV IT days 1, 3) (0.75 mg/kg AC003128 IT day 15) | 0.800 | 0.074 | 0.082 |
| Group 9 (AAV IT days 1, 3) (3.0 mg/kg AC003099 IT day 15) | 0.518 | 0.100 | 0.124 |
| Group 10 (AAV IT days 1, 3) (3.0 mg/kg AC003252 IT day 15) | 0.576 | 0.124 | 0.157 |
| Group 11 (AAV IT days 1, 3) (3.0 mg/kg AC003253 IT day 15) | 0.508 | 0.127 | 0.170 |

[0339] As shown in Table 21, above, the TSLP RNAi agents each showed some reductions in hTSLP expression compared to control, and further a dose response was shown for AC003100 and AC003128. Group 2 (3.0 mg/kg of AC003100, targeting position 571 of the TSLP gene) showed an approximately 55% reduction (0.448) in hTSLP mRNA. Further, hTSLP protein expression was measured for some of the dosing groups by MSD assay from the lower right lobe of the mouse lung tissues collected, and the data from certain of the samples are shown in FIG. 2. As shown in FIG. 2, 82% reduction in hTSLP protein was seen from Group 6 (3 mg/kg AC003128), which targeted position 520 of the TSLP gene; substantial reductions in hTSLP protein were also evidenced with other groups.

### Example 6. AAV9-CAG-hTSLP AAV Mouse Model

[0340] To evaluate certain TSLP RNAi agents, the same AAV9-CAG-hTSLP (Adeno-associated virus) mouse model as discussed in Example 4 was used.

[0341] The human TSLP mRNA expression was measured in the mice lung tissues by qPCR

[0342] At day 1 and Day 3, each mouse was given an intratracheal (IT) administration of 50 μL AAV solutions containing 2e10 GC (genome copy) of AAV9-CAG-eGFP and 3e10 GC of AAV9-CAG-hTSLP in PBS, or vehicle control (PBS). At Day 17 and 20, each mouse was given intratracheal administration of 50 μL of 1.5 mg/kg of TSLP RNAi agents formulated in isotonic saline, or vehicle control (isotonic saline with no RNAi agent), according to the following Table 22. The mice were humanely sacrificed and harvested on Day 31.

TABLE 22
Targeted Positions and Dosing Groups of Example 6.

| | Targeted TSLP | | | |
|---|---|---|---|---|
| | Gene Position | | | |
| | (within SEQ ID | | RNAi Agent | |
| | NO: 1, GenBank | AAV dose | and Dose | |
| Group | NM_033035.5) | (Day 1, 3) | (Day 17, 20) | Dosing Regimen |
| 1 | N/A | PBS | Saline (no RNAi | IT doses of PBS on |
| | | | agent) | Day 1, 3; |
| | | | | IT doses of saline on |
| | | | | days 17, 20 |
| 2 | N/A | 2e10 GC of AAV9- | Saline (no RNAi | IT doses of AAV on |
| | | CAG-eGFP and | agent) | Day 1, 3; |
| | | 3e10 GC of AAV9- | | IT dose2 of saline |
| | | CAG-hTSLP | | on days 17, 20 |
| 3 | 520 | 2e10 GC of AAV9- | 1.5 mg/kg | IT doses of AAV on |
| | | CAG-eGFP and | AC003128 | Day 1, 3; |
| | | 3e10 GC of AAV9- | | IT doses of RNAi |
| | | CAG-hTSLP | | agent on days 17, 20 |
| 4 | 520 | 2e10 GC of AAV9- | 1.5 mg/kg | IT doses of AAV on |
| | | CAG-eGFP and | AC003341 | Day 1, 3; |
| | | 3e10 GC of AAV9- | | IT doses of RNAi |
| | | CAG-hTSLP | | agent on days 17, 20 |
| 5 | 520 | 2e10 GC of AAV9- | 1.5 mg/kg | IT doses of AAV on |
| | | CAG-eGFP and | AC003342 | Day 1, 3; |
| | | 3e10 GC of AAV9- | | IT doses of RNAi |
| | | CAG-hTSLP | | agent on days 17, 20 |
| 6 | 520 | 2e10 GC of AAV9- | 1.5 mg/kg | IT doses of AAV on |
| | | CAG-eGFP and | AC003343 | Day 1, 3; |
| | | 3e10 GC of AAV9- | | IT doses of RNAi |
| | | CAG-hTSLP | | agent on days 17, 20 |
| 7 | 520 | 2e10 GC of AAV9- | 1.5 mg/kg | IT doses of AAV on |
| | | CAG-eGFP and | AC003344 | Day 1, 3; |
| | | 3e10 GC of AAV9- | | IT doses of RNAi |
| | | CAG-hTSLP | | agent on days 17, 20 |
| 8 | 520 | 2e10 GC of AAV9- | 1.5 mg/kg | IT doses of AAV on |
| | | CAG-eGFP and | AC003345 | Day 1, 3; |
| | | 3e10 GC of AAV9- | | IT doses of RNAi |
| | | CAG-hTSLP | | agent on days 17, 20 |
| 9 | 520 | 2e10 GC of AAV9- | 1.5 mg/kg | IT doses of AAV on |
| | | CAG-eGFP and | AC003346 | Day 1, 3; |
| | | 3e10 GC of AAV9- | | IT doses of RNAi |
| | | CAG-hTSLP | | agent on days 17, 20 |
| 10 | 520 | 2e10 GC of AAV9- | 1.5 mg/kg | IT doses of AAV on |
| | | CAG-eGFP and | AC003347 | Day 1, 3; |
| | | 3e10 GC of AAV9- | | IT doses of RNAi |
| | | CAG-hTSLP | | agent on days 17, 20 |
| 11 | 571 | 2e10 GC of AAV9- | 1.5 mg/kg | IT doses of AAV on |
| | | CAG-eGFP and | AC003100 | Day 1, 3; |
| | | 3e10 GC of AAV9- | | IT doses of RNAi |
| | | CAG-hTSLP | | agent on days 17, 20 |

[0343] Each of the TSLP RNAi agents included modified nucleotides that were conjugated at the 5′ terminal end of the sense strand to an αvβ6 integrin targeting ligand having the modified sequences as set forth in the duplex structures herein. (See Tables 3, 4, 5, 6, 7A, 7B, 8, 9, 10, and 11 for specific modifications and structure information related to the TSLP RNAi agents, including Tri-SM6.1-αvβ6). The TSLP RNAi agents in Groups 3-8 each included nucleotide sequences that were designed to inhibit expression of a TSLP gene by targeting specific positions of TSLP mRNA as set forth in Table 22, above. (See. e.g., SEQ ID NO:1 and Table 2 for the TSLP mRNA sequence referenced.)

[0344] Five (5) mice in each group were tested (n=5) in each group, except for Group 1 where only 4 mice were tested. TSLP mRNA expression levels were determined by qPCR Data from the experiment are shown in the following Table 23:

TABLE 23
Average Relative TSLP Normalized to Control in AAV-hTSLP Mice from Example 6.

| | Average Relative hTSLP | Low | High |
|---|---|---|---|
| Group ID | mRNA Expression | (error) | (error) |
| Group 1 (PBS IT days 1, 3) (saline IT days 17, 20) | N/A | | |
| Group 2 (AAV days 1, 3) (saline IT days 17, 20) | 1.000 | 0.232 | 0.302 |
| Group 3 (AAV IT days 1, 3) (1.5 mg/kg AC003128 IT days 17, 20) | 0.685 | 0.183 | 0.249 |
| Group 4 (AAV IT days 1, 3) (1.5 mg/kg AC003341 IT days 17, 20) | 0.512 | 0.130 | 0.174 |
| Group 5 (AAV IT days 1, 3) (1.5 mg/kg AC003342 IT days 17, 20) | 0.453 | 0.077 | 0.093 |
| Group 6 (AAV IT days 1, 3) (1.5 mg/kg AC003343 IT days 17, 20) | 0.552 | 0.207 | 0.332 |
| Group 7 (AAV IT days 1, 3) (1.5 mg/kg AC003344 IT days 17, 20) | 0.495 | 0.116 | 0.151 |
| Group 8 (AAV IT days 1, 3) (1.5 mg/kg AC003345 IT days 17, 20) | 0.434 | 0.086 | 0.108 |
| Group 9 (AAV IT days 1, 3) (1.5 mg/kg AC003346 IT days 17, 20) | 0.613 | 0.188 | 0.271 |
| Group 10 (AAV IT days 1, 3) (1.5 mg/kg AC003347 IT days 17, 20) | 0.595 | 0.173 | 0.243 |
| Group 11 (AAV IT days 1, 3) (1.5 mg/kg AC003100 IT days 17, 20) | 0.847 | 0.229 | 0.313 |

[0345] As shown in Table 23, above, each of the TSLP RNAi agents tested showed reductions in hTSLP expression compared to control. In particular, Group 5 (1.5 mg/kg of AC003342, targeting position 520 of the TSLP gene) showed an approximately 55% reduction (0.453) in hTSLP mRNA, and Group 8 (1.5 mg/kg of AC003345, also targeting position 520 of the TSLP gene) showed an approximately 57% reduction (0.434) in hTSLP mRNA.

### Example 7. AAV9-CAG-hTSLP AAV Mouse Model

[0346] To evaluate certain TSLP RNAi agents, the same AAV9-CAG-hTSLP (Adeno-associated virus) mouse model as discussed in Example 4 was used.

[0347] The human TSLP mRNA expression was measured in the mice lung tissues by qPCR

[0348] At day 1 and Day 3, each mouse was given an intratracheal (IT) administration of 50 μL AAV solutions containing 2e10 GC (genome copy) of AAV9-CAG-eGFP and 3e10 GC of AAV9-CAG-hTSLP in PBS, or vehicle control (PBS). At Day 15 and 18, each mouse was given intratracheal administration of 50 μL of 1.5 mg/kg of TSLP RNAi agents formulated in isotonic saline, or vehicle control (isotonic saline with no RNAi agent), according to the following Table 22. The mice were humanely sacrificed and harvested on Day 31.

TABLE 24
Targeted Positions and Dosing Groups of Example 7.

| | Targeted TSLP | | | |
|---|---|---|---|---|
| | Gene Position | | | |
| | (within SEQ ID | | RNAi Agent | |
| | NO: 1, GenBank | AAV dose | and Dose | |
| Group | NM_033035.5) | (Day 1, 3) | (Day 15, 18) | Dosing Regimen |
| 1 | N/A | PBS | Saline (no RNAi | IT doses of PBS on |
| | | | agent) | Day 1, 3; |
| | | | | IT doses of saline on |
| | | | | days 15, 18 |
| 2 | N/A | 2e10 GC of AAV9- | Saline (no RNAi | IT doses of AAV on |
| | | CAG-eGFP and | agent) | Day 1, 3; |
| | | 3e10 GC of AAV9- | | IT doses of saline on |
| | | CAG-hTSLP | | days 15, 18 |
| 3 | 571 | 2e10 GC of AAV9- | 1.5 mg/kg | IT doses of AAV on |
| | | CAG-eGFP and | AC003100 | Day 1, 3; |
| | | 3e10 GC of AAV9- | | IT doses of RNAi |
| | | CAG-hTSLP | | agent on days 15, 18 |
| 4 | 571 | 2e10 GC of AAV9- | 1.5 mg/kg | IT doses of AAV on |
| | | CAG-eGFP and | AC003371 | Day 1, 3; |
| | | 3e10 GC of AAV9- | | IT doses of RNAi |
| | | CAG-hTSLP | | agent on days 15, 18 |
| 5 | 571 | 2e10 GC of AAV9- | 1.5 mg/kg | IT doses of AAV on |
| | | CAG-eGFP and | AC003372 | Day 1, 3; |
| | | 3e10 GC of AAV9- | | IT doses of RNAi |
| | | CAG-hTSLP | | agent on days 15, 18 |
| 6 | 571 | 2e10 GC of AAV9- | 1.5 mg/kg | IT doses of AAV on |
| | | CAG-eGFP and | AC003373 | Day 1, 3; |
| | | 3e10 GC of AAV9- | | IT doses of RNAi |
| | | CAG-hTSLP | | agent on days 15, 18 |
| 7 | 571 | 2e10 GC of AAV9- | 1.5 mg/kg | IT doses of AAV on |
| | | CAG-eGFP and | AC003374 | Day 1, 3; |
| | | 3e10 GC of AAV9- | | IT doses of RNAi |
| | | CAG-hTSLP | | agent on days 15, 18 |
| 8 | 571 | 2e10 GC of AAV9- | 1.5 mg/kg | IT doses of AAV on |
| | | CAG-eGFP and | AC003375 | Day 1, 3; |
| | | 3e10 GC of AAV9- | | IT doses of RNAi |
| | | CAG-hTSLP | | agent on days 15, 18 |
| 9 | 571 | 2e10 GC of AAV9- | 1.5 mg/kg | IT doses of AAV on |
| | | CAG-eGFP and | AC003376 | Day 1, 3; |
| | | 3e10 GC of AAV9- | | IT doses of RNAi |
| | | CAG-hTSLP | | agent on days 15, 18 |
| 10 | 571 | 2e10 GC of AAV9- | 1.5 mg/kg | IT doses of AAV on |
| | | CAG-eGFP and | AC003377 | Day 1, 3; |
| | | 3e10 GC of AAV9- | | IT doses of RNAi |
| | | CAG-hTSLP | | agent on days 15, 18 |
| 11 | 571 | 2e10 GC of AAV9- | 1.5 mg/kg | IT doses of AAV on |
| | | CAG-eGFP and | AC003378 | Day 1, 3; |
| | | 3e10 GC of AAV9- | | IT doses of RNAi |
| | | CAG-hTSLP | | agent on days 15, 18 |
| 12 | 571 | 2e10 GC of AAV9- | 1.5 mg/kg | IT doses of AAV on |
| | | CAG-eGFP and | AC003379 | Day 1, 3; |
| | | 3e10 GC of AAV9- | | IT doses of RNAi |
| | | CAG-hTSLP | | agent on days 15, 18 |

[0349] Each of the TSLP RNAi agents included modified nucleotides that were conjugated at the 5′ terminal end of the sense strand to an αvβ6 integrin targeting ligand having the modified sequences as set forth in the duplex structures herein. (See Tables 3, 4, 5, 6, 7A, 7B, 8, 9, 10, and 11 for specific modifications and structure information related to the TSLP RNAi agents, including Tri-SM6.1-αvβ6). The TSLP RNAi agents in Groups 3-8 each included nucleotide sequences that were designed to inhibit expression of a TSLP gene by targeting specific positions of TSLP mRNA as set forth in Table 24, above. (See. e.g., SEQ ID NO:1 and Table 2 for the TSLP mRNA sequence referenced.)

[0350] Five (5) mice in each group were tested (n=5) in each group, except for Group 1 where only 4 mice were tested. Left lobe lungs were collected in 4% PFA for histology analysis. Lower right lobes were collected for human TSLP protein measurement by Meso Scale Discovery (MSD) Assay. All remaining right lobes were collected for TSLP mRNA expression measurement by qPCR Data from the experiment are shown in the following Table 25:

TABLE 25
Average Relative TSLP Normalized to Control in AAV-hTSLP Mice from Example 7.

| | Average Relative hTSLP | Low | High |
|---|---|---|---|
| Group ID | mRNA Expression | (error) | (error) |
| Group 1 (PBS IT days 1, 3) (saline IT days 17, 20) | N/A | | |
| Group 2 (AAV days 1, 3) (saline IT days 17, 20) | 1.000 | 0.128 | 0.146 |
| Group 3 (AAV IT days 1, 3) (1.5 mg/kg AC003100 IT days 15, 18) | 0.372 | 0.040 | 0.045 |
| Group 4 (AAV IT days 1, 3) (1.5 mg/kg AC003371 IT days 15, 18) | 0.363 | 0.108 | 0.154 |
| Group 5 (AAV IT days 1, 3) (1.5 mg/kg AC003372 IT days 15, 18) | 0.474 | 0.086 | 0.105 |
| Group 6 (AAV IT days 1, 3) (1.5 mg/kg AC003373 IT days 15, 18) | 0.750 | 0.126 | 0.151 |
| Group 7 (AAV IT days 1, 3) (1.5 mg/kg AC003374 IT days 15, 18) | 0.335 | 0.037 | 0.041 |
| Group 8 (AAV IT days 1, 3) (1.5 mg/kg AC003375 IT days 15, 18) | 0.329 | 0.048 | 0.056 |
| Group 9 (AAV IT days 1, 3) (1.5 mg/kg AC003376 IT days 15, 18) | 0.395 | 0.086 | 0.109 |
| Group 10 (AAV IT days 1, 3) (1.5 mg/kg AC003377 IT days 15, 18) | 0.432 | 0.064 | 0.074 |
| Group 11 (AAV IT days 1, 3) (1.5 mg/kg AC003378 IT days 15, 18) | 0.411 | 0.060 | 0.070 |
| Group 12 (AAV IT days 1, 3) (1.5 mg/kg AC003379 IT days 15, 18) | 0.327 | 0.046 | 0.053 |

[0351] As shown in Table 25, above, each of the TSLP RNAi agents tested showed reductions in hTSLP expression compared to control. In particular, several of the TSLP RNAi agents targeting the TSLP transcript at position 571 achieved more than 60% hTSLP mRNA inhibition, with AC003371 achieving 64% knockdown (Group 4, 0.363), AC003374 achieving 66% knockdown (Group 7, 0.335), and AC003375 achieving 67% knockdown (Group 8, 0.329) mRNA. Further, hTSLP protein expression was measured for each of the dosing groups by MSD assay from the lower right lobe of the mouse lung tissues collected, and the data from certain of the samples are shown in FIGS. 3A and 3B. As shown in FIGS. 3A and 3B, greater than 90% reductions hTSLP protein was seen from Group 4 (3 mg/kg AC003371), which targeted position 571 of the TSLP gene; substantial reductions in hTSLP protein were also evidenced with each of the other Groups.

### Example 8. In Vivo Inhaled Aerosolized Administration of Rat-Specific TSLP RNAI Agents in Rats

[0352] On study day 1, male Sprague Dawley rats were administered a single targeted deposited dose of 1.5 mg/kg of the rat-specific RNAi agent AC001714, the chemical structure of which is set forth in Example 2, or a single dose of isotonic saline.

[0353] Using a jet nebulizer (Misty Max 10), aerosol was delivered to a rodent single-tier flow-past nose-only inhalation exposure chamber (CH Technologies). One of the ports was equipped with a filter housing so that RNAi agent aerosol concentration could be assessed. Using an assumed respiratory minute volume allometrically scaled to rodent body weight, along with aerosol concentration determined from filter collection and RNAi agent quantification, exposure times were adjusted to target the dose level at 1.5 mg/kg. The actual pulmonary deposited doses (PDD) are listed in Table 26:

TABLE 26
Rat-specific TSLP RNAi Agent and Dosing for Example 8.

| | AC | Animals | Harvest/ |
|---|---|---|---|
| | Duplex | per | Sacrifice |
| Group ID | Number | Group | Day |
| Group 1 (saline PDD day 1) | N/A | 5 | Day 28 |
| Group 2 (PDD dose 1.66 mg/kg AC001714 on day 1) | AC001714 | 5 | Day 28 |
| Group 3 (saline PDD day 1) | N/A | 5 | Day 56 |
| Group 4 (PDD dose 1.66 mg/kg AC001714 on day 1) | AC001714 | 5 | Day 56 |
| Group 5 (saline PDD day 1) | N/A | 5 | Day 84 |
| Group 6 (PDD dose 1.66 mg/kg AC001714 on day 1) | AC001714 | 5 | Day 84 |
| Group 7 (saline PDD day 1) | N/A | 5 | Day 112 |
| Group 8 (PDD dose 1.82 mg/kg AC001714 on day 1) | AC001714 | 5 | Day 112 |
| Group 9 (saline PDD day 1) | N/A | 5 | Day 140 |
| Group 10 (PDD dose 1.82 mg/kg AC001714 on day 1) | AC001714 | 5 | Day 140 |
| Group 11 (saline PDD day 1) | N/A | 5 | Day 168 |
| Group 12 (PDD dose 1.82 mg/kg AC001714 on day 1) | AC001714 | 5 | Day 168 |

[0354] Five (5) rats were dosed per group. Rats were sacrificed in accordance with Table 26, and total RNA was isolated from both lungs following collection and homogenization. Rat TSLP mRNA expression was quantitated by probe-based quantitative PCR, normalized to rat B2M expression, and expressed as fraction of vehicle control group (geometric mean, +/−95% confidence interval).

TABLE 27
Average Relative Rat TSLP mRNA Expression at Sacrifice in Example 8

| | Average Relative rTSLP | Low | High |
|---|---|---|---|
| Group ID | mRNA Expression | (error) | (error) |
| Group 1 (isotonic saline; day 28 sacrifice) | 1.000 | 0.242 | 0.292 |
| Group 2 (1.5 mg/kg AC001714; day 28 sacrifice) | 0.657 | 0.097 | 0.114 |
| Group 3 (isotonic saline; day 56 sacrifice) | 1.000 | 0.173 | 0.142 |
| Group 4 (1.5 mg/kg AC001714; day 56 sacrifice) | 0.729 | 0.119 | 0.142 |
| Group 5 (isotonic saline; day 84 sacrifice) | 0.798 | 0.107 | 0.160 |
| Group 6 (1.5 mg/kg AC001714; day 84 sacrifice) | 0.572 | 0.064 | 0.047 |
| Group 7 (isotonic saline; day 112 sacrifice) | 0.882 | 0.262 | 0.397 |
| Group 8 (1.5 mg/kg AC001714; day 112 sacrifice) | 0.726 | 0.082 | 0.095 |
| Group 9 (isotonic saline; day 140 sacrifice) | 0.853 | 0.274 | 0.391 |
| Group 10 (1.5 mg/kg AC001714; day 140 sacrifice) | 1.171 | 0.494 | 0.990 |
| Group 11 (isotonic saline; day 168 sacrifice) | 0.909 | 0.165 | 0.282 |
| Group 12 (1.5 mg/kg AC001714; day 168 sacrifice) | 1.017 | 0.175 | 0.174 |

[0355] As shown in the data in Table 27 above, even when administered by inhalation, meaningful inhibition of TSLP gene expression was evident by this particular rat-specific RNAi agent tool that employed an integrin-targeting ligand (AC001714) through at least day 84.

### Example 9. In Vivo Intratracheal Administration of Rat-Speck TSLP RNAI Agents in Rats

[0356] On study day 1 and day 3, male Sprague Dawley rats were administered 200 microliters via a microsprayer device (Penn Century, Philadelphia, PA) suitable for intratracheal (IT) administration of (i) isotonic saline, or (ii) 5 mg/kg of the rat-specific RNAi agent AC001714, the chemical structure of which is set forth in Example 2, or (iii) a “RISC-blocked” RNAi trigger, which include a construct similar to AC001714, including the same targeting ligand, but included chemical modifications designed to prevent the loading of the antisense strand into RISC, thus serving as a negative control, in accordance with the following Table 28:

TABLE 28
Rat-specific TSLP RNAi Agent and Dosing for Example 9.

| | AC | Animals | Harvest/ |
|---|---|---|---|
| | Duplex | per | Sacrifice |
| Group ID | Number | Group | Day |
| Group 1 (saline IT days 1, 3) | N/A | 5 | Day 15 |
| Group 2 (saline IT days 1, 3) | N/A | 5 | Day 29 |
| Group 3 (saline IT days 1, 3) | N/A | 5 | Day 43 |
| Group 4 (saline IT days 1, 3) | N/A | 5 | Day 57 |
| Group 5 (IT dose 5.0 mg/kg AC001714 on days 1,3) | AC001714 | 5 | Day 15 |
| Group 6 (IT dose 5.0 mg/kg RISC-blocked negative | AC001714 | 5 | Day 29 |
| control RNAi trigger on days 1, 3) | | | |
| Group 7 (IT dose 5.0 mg/kg AC001714 on days 1, 3) | AC001714 | 5 | Day 29 |
| Group 8 (IT dose 5.0 mg/kg AC001714 on days 1, 3) | AC001714 | 5 | Day 43 |
| Group 9 (IT dose 5.0 mg/kg AC001714 on days 1, 3) | AC001714 | 5 | Day 57 |

[0357] Five (5) rats were dosed per group. Rats were sacrificed in accordance with Table 28, and total RNA was isolated from both lungs following collection and homogenization. Rat TSLP mRNA expression was quantitated by probe-based quantitative PCR, normalized to rat B2M expression, and expressed as fraction of vehicle control group (geometric mean, +/−95% confidence interval).

TABLE 29
Average Relative Rat TSLP mRNA Expression at Sacrifice in Example 9

| | Average Relative rTSLP | Low | High |
|---|---|---|---|
| Group ID | mRNA Expression | (error) | (error) |
| Group 1 (saline IT days 1, 3; day 15 sacrifice) | 1.000 | 0.137 | 0.159 |
| Group 2 (saline IT days 1, 3; day 29 sacrifice) | 1.000 | 0.139 | 0.162 |
| Group 3 (saline IT days 1, 3; day 43 sacrifice) | 1.000 | 0.207 | 0.261 |
| Group 4 (saline IT days 1, 3; day 57 sacrifice) | 1.000 | 0.227 | 0.294 |
| Group 5 (IT dose 5.0 mg/kg AC001714 on days 1,3; | 0.506 | 0.088 | 0.106 |
| day 15 sacrifice) | | | |
| Group 6 (IT dose 5.0 mg/kg RISC-blocked negative | 0.640 | 0.223 | 0.342 |
| control RNAi trigger on days 1, 3; day 29 sacrifice) | | | |
| Group 7 (IT dose 5.0 mg/kg AC001714 on days 1, 3; | 0.495 | 0.067 | 0.078 |
| day 29 sacrifice) | | | |
| Group 8 (IT dose 5.0 mg/kg AC001714 on days 1, 3; | 0.394 | 0.146 | 0.232 |
| day 43 sacrifice) | | | |
| Group 9 (IT dose 5.0 mg/kg AC001714 on days 1, 3; | 0.371 | 0.132 | 0.204 |
| day 57 sacrifice) | | | |

[0358] As shown in the data in Table 29 above, meaningful inhibition of TSLP gene expression was evident by this particular rat-specific RNAi agent tool that employed an integrin-targeting ligand (AC001714; Groups 5, 7, 8 and 9) through at least day 57.

### Example 10 In Vivo Intratracheal Administration of Rat Specific TSLP RNAi Agents in Rats

[0359] On study day 1 and day 3, male Brown Norway rats were administered 200 microliters via a microsprayer device (Penn Century, Philadelphia, PA) suitable for intratracheal (IT) administration of (i) isotonic saline, or (ii) 5 mg/kg of the rat-specific RNAi agent AC001714, the chemical structure of which is set forth in Example 2, or (iii) a “RISC-blocked” RNAi trigger, which include a construct similar to AC001714, including the same targeting ligand, but included chemical modifications designed to prevent the loading of the antisense strand into RISC, thus serving as a negative control, in accordance with the following Table 30:

TABLE 30
Rat-specific TSLP RNAi Agent and Dosing for Example 10.

| | AC | Animals | |
|---|---|---|---|
| | Duplex | per | Harvest/ |
| Group ID | Number | Group | Sacrifice Day |
| Group 1 (saline IT days 1, 3) (PBS IT | N/A | 6 | Day 13 |
| day 13) | | | |
| Group 2 (saline IT days 1, 3) (Alternaria | N/A | 7 | Day 13 |
| IT day 13) | | | (2 hr post Alternaria) |
| Group 3 (saline IT days 1, 3) (Alternaria | N/A | 7 | Day 14 |
| IT day 13) | | | (24 hr post Alternaria) |
| Group 4 (IT dose 5.0 mg/kg RISC- | N/A | 7 | Day 13 |
| blocked trigger on days 1, 3)/ | | | (2 hr post Alternaria) |
| (Alternaria IT day 13) | | | |
| Group 5 (IT dose 5.0 mg/kg AC001714 | AC001714 | 7 | Day 13 |
| on days 1, 3)/(Alternaria IT day 13) | | | (2 hr post Alternaria) |
| Group 6 (IT dose 5.0 mg/kg RISC- | N/A | 7 | Day 14 |
| blocked trigger on days 1, 3)/ | | | (24 hr post Alternaria) |
| (Alternaria IT day 13) | | | |
| Group 7 (IT dose 5.0 mg/kg AC001714 | AC001714 | 7 | Day 14 |
| on days 1, 3)/(Alternaria IT day 13) | | | (24 hr post Alternaria) |

[0360] On day 13, rats were challenged with a single intra-tracheal dose of 500 μg/rat of Alternaria alternata prepared in phosphate buffered saline (PBS). Rats in Group 1 were administered only with PBS as control.

[0361] After either 2 or 24 hours post-administration of the Alternaria (i.e., either day 13 or 14), rats were anesthetized with isoflurane/02, blood was drawn, and were then humanely euthanized by exsanguination. Days of sacrifice/euthanasia are shown in Table 30 above. Trachea was canulated and bronchoalveolar lavage (BAL) collected after washing with 2×5 mL of ice-cold PBS. BAL samples were spun down, cells resuspended with 1 mL of ice-cold PBS, and aliquot was mixed with Turk's solution (ratio 1:1), and total cell counted via hemocytomers. Cytospins were prepared, stained and differential cell counting performed. Supernatant was used for cytokine measurements. Right lung lobes were used to determine rTSLP mRNA expression and left lung lobes were collected in 4% PFA/PBS for histology (Trichrome and Sirius Red Staining, RNAscope).

[0362] Rat TSLP mRNA expression was quantitated by probe-based quantitative PCR, normalized to rat B2M expression, and expressed as fraction of vehicle control group (geometric mean, +/−95% confidence interval).

TABLE 31
Average Relative Rat TSLP mRNA Expression at
Sacrifice (i.e., Day 13 or 14) in Example 10

| | Average Relative rTSLP | Low | High |
|---|---|---|---|
| Group ID | mRNA Expression | (error) | (error) |
| Group 1 (saline IT days 1, 3) (PBS IT day 13) | 1.000 | 0.208 | 0.263 |
| Group 2 (saline IT days 1, 3) (Alternaria IT | 1.088 | 0.174 | 0.207 |
| day 13) | | | |
| Group 3 (saline IT days 1, 3) (Alternaria IT | 1.016 | 0.211 | 0.267 |
| day 13) | | | |
| Group 4 (IT dose 5.0 mg/kg RISC-blocked | 1.172 | 0.237 | 0.298 |
| trigger on days 1, 3)/(Alternaria IT day 13) | | | |
| Group 5 (IT dose 5.0 mg/kg AC001714 on | 0.538 | 0.071 | 0.082 |
| days 1, 3)/(Alternaria IT day 13) | | | |
| Group 6 (IT dose 5.0 mg/kg RISC-blocked | 0.725 | 0.106 | 0.125 |
| trigger on days 1, 3)/(Alternaria IT day 13) | | | |
| Group 7 (IT dose 5.0 mg/kg AC001714 on | 0.524 | 0.104 | 0.130 |
| days 1, 3)/(Alternaria IT day 13) | | | |

[0363] As shown in Table 31 above, the Groups administered AC001714 (i.e., Groups 5 and 7) each showed substantial reductions of rTSLP mRNA at the respective time of sacrifice relative to the respective control groups. These results are also shown in FIG. 4A.

[0364] Granulocytes, such as eosinophils, are well known markers for cellular inflammation. For the BAL samples, the total and differential cells were counted and the number of inflammatory cells were derived. The impact of rTSLP inhibition by the rat-specific TSLP RNAi agents disclosed herein on eosinophilic inflammation induced by Alternaria extract was assessed. BAL total cells and eosinophils counts are shown in FIGS. 4B and 4C. Groups 5 and 7 (treated with rat-specific TSLP RNAi agent) showed significant reductions of total BAL cell counts and eosinophils across all time points when compared to their respective control. As shown in FIG. 4B, a significant reduction of eosinophils at both 2 hours and 24 hours post Alternaria challenge (Groups 5 and 7, respectively) was observed as compared to Groups 2 and 3, respectively. Moreover, as shown in FIG. 4C, BAL total cells was significantly reduced at both 2 hour and 24 hour post Alternaria challenge (Groups 5 and 7, respectively) as compared to control Groups 2 and 3, respectively. Statistical significance is denoted **** p-value is p<0.0001.

[0365] This study provides physiological support in a rat model that a reduction in TSLP gene expression (rTSLP mRNA) can provide a phenotype improvement to reduce pulmonary inflammation, and thus can potentially treat diseases such as allergic asthma.

### Example 11. AAV9-CAG-hTSLP AAV Mouse Model

[0366] To evaluate certain TSLP RNAi agents, the same AAV9-CAG-hTSLP (Adeno-associated virus) mouse model as discussed in Example 4 was used.

[0367] The human TSLP mRNA expression was measured in the mice lung tissues by qPCR

[0368] At Day 1 and Day 5, each mouse was given an intratracheal (IT) administration of 50 μL AAV solutions containing 2e10 GC (genome copy) of AAV9-CAG-eGFP and 3e10 GC of AAV9-CAG-hTSLP in PBS, or vehicle control (PBS). At Day 20 and Day 22, each mouse was given intratracheal administration of 50 μL of 1.0 mg/kg of TSLP RNAi agents formulated in isotonic saline, or vehicle control (isotonic saline with no RNAi agent), according to the following Table 32. The mice were humanely sacrificed and harvested on Day 32.

TABLE 32
Targeted Positions and Dosing Groups of Example 11.

| | Targeted TSLP | | | |
|---|---|---|---|---|
| | Gene Position | | | |
| | (within SEQ ID | | RNAi Agent | |
| | NO: 1, GenBank | AAV dose | and Dose | |
| Group | NM_033035.5) | (Day 1, 3) | (Day 15, 18) | Dosing Regimen |
| 1 | N/A | 2e10 GC of AAV9- | Saline | IT doses of AAV on |
| | | CAG-eGFP and | | Day 1, 5; |
| | | 3e10 GC of AAV9- | | IT doses of saline on |
| | | CAG-hTSLP | | Days 20, 22 |
| 2 | 571 | 2e10 GC of AAV9- | 1.0 mg/kg | IT doses of AAV on |
| | | CAG-eGFP and | AC003374 | Day 1, 5; |
| | | 3e10 GC of AAV9- | | IT doses of RNAi |
| | | CAG-hTSLP | | agent on Days 20, 22 |
| 3 | 571 | 2e10 GC of AAV9- | 1.0 mg/kg | IT doses of AAV on |
| | | CAG-eGFP and | AC004077 | Day 1, 5; |
| | | 3e10 GC of AAV9- | | IT doses of RNAi |
| | | CAG-hTSLP | | agent on Days 20, 22 |
| 4 | 571 | 2e10 GC of AAV9- | 1.0 mg/kg | IT doses of AAV on |
| | | CAG-eGFP and | AC004078 | Day 1, 5; |
| | | 3e10 GC of AAV9- | | IT doses of RNAi |
| | | CAG-hTSLP | | agent on Days 20, 22 |
| 5 | 570 | 2e10 GC of AAV9- | 1.0 mg/kg | IT doses of AAV on |
| | | CAG-eGFP and | AC003567 | Day 1, 5; |
| | | 3e10 GC of AAV9- | | IT doses of RNAi |
| | | CAG-hTSLP | | agent on Days 20, 22 |
| 6 | 570 | 2e10 GC of AAV9- | 1.0 mg/kg | IT doses of AAV on |
| | | CAG-eGFP and | AC003511 | Day 1, 5; |
| | | 3e10 GC of AAV9- | | IT doses of RNAi |
| | | CAG-hTSLP | | agent on Days 20, 22 |
| 7 | 570 | 2e10 GC of AAV9- | 1.0 mg/kg | IT doses of AAV on |
| | | CAG-eGFP and | AC004079 | Day 1, 5; |
| | | 3e10 GC of AAV9- | | IT doses of RNAi |
| | | CAG-hTSLP | | agent on Days 20, 22 |
| 8 | 571 | 2e10 GC of AAV9- | 1.0 mg/kg | IT doses of AAV on |
| | | CAG-eGFP and | AC003602 | Day 1, 5; |
| | | 3e10 GC of AAV9- | | IT doses of RNAi |
| | | CAG-hTSLP | | agent on Days 20, 22 |

[0369] Each of the TSLP RNAi agents included modified nucleotides that were conjugated at the 5′ terminal end of the sense strand to an αvβ6 integrin targeting ligand having the modified sequences as set forth in the duplex structures herein. (See Tables 3, 4, 5, 6, 7A, 7B, 8, 9, 10, and 11 for specific modifications and structure information related to the TSLP RNAi agents, including Tri-SM6.1-αvβ6). The TSLP RNAi agents in Groups 2-8 each included nucleotide sequences that were designed to inhibit expression of a TSLP gene by targeting specific positions of TSLP mRNA as set forth in Table 32, above. (See. e.g., SEQ ID NO:1 and Table 2 for the TSLP mRNA sequence referenced.)

[0370] Five (5) mice in each group were tested (n=5) in each group. Left lobe lungs were collected in 4% PFA for histology analysis. Lower right lobes were collected for human TSLP protein measurement by Meso Scale Discovery (MSD) Assay. All remaining right lobes were collected for TSLP mRNA expression measurement by qPCR Data from the experiment are shown in the following Table 33:

TABLE 33
Average Relative TSLP Normalized to Control in AAV-hTSLP Mice from Example 11.

| | Average Relative hTSLP | Low | High |
|---|---|---|---|
| Group ID | mRNA Expression | (error) | (error) |
| Group 1 (AAV IT Days 1, 5) (Saline IT Days 17, 20) | 1.000 | 0.147 | 0.172 |
| Group 2 (AAV IT Days 1, 5) (1.0 mg/kg AC003374 IT Days 20, 22) | 0.330 | 0.071 | 0.090 |
| Group 3 (AAV IT Days 1, 5) (1.0 mg/kg AC004077 IT Days 20, 22) | 0.657 | 0.120 | 0.146 |
| Group 4 (AAV IT Days 1, 5) (1.0 mg/kg AC004078 IT Days 20, 22) | 0.476 | 0.067 | 0.078 |
| Group 5 (AAV IT Days 1, 5) (1.0 mg/kg AC003567 IT Days 20, 22) | 0.452 | 0.064 | 0.074 |
| Group 6 (AAV IT Days 1, 5) (1.0 mg/kg AC003511 IT Days 20, 22) | 0.547 | 0.101 | 0.123 |
| Group 7 (AAV IT Days 1, 5) (1.0 mg/kg AC004079 IT Days 20, 22) | 0.687 | 0.141 | 0.178 |
| Group 8 (AAV IT Days 1, 5) (1.0 mg/kg AC003602 IT Days 20, 22) | 0.380 | 0.079 | 0.100 |

[0371] As shown in Table 33, above, each of the TSLP RNAi agents tested (Groups 2-8) showed reductions in hTSLP expression compared to control (Group 1). In particular, several of the TSLP RNAi agents targeting the TSLP transcript at position 571 achieved more than 60% hTSLP mRNA inhibition, with AC003374 achieving ˜67% knockdown (Group 2, 0.330), and AC003602 achieving ˜62% knockdown (Group 8, 0.380), mRNA. These results are also shown in FIG. 6A.

[0372] Further, hTSLP protein expression was measured for each of the dosing groups by MSD assay from the lower right lobe of the mouse lung tissues collected, and the data from certain of the samples are shown in FIGS. 6B and 6C. As shown in FIG. 6B, AC003374 and AC003602 (Groups 2 and 8, respectively) achieved ˜88% and ˜77% reduction, respectively, in human TSLP protein in AAV transduced mouse lungs at 1.0 mg/kg. Furthermore, as shown in FIG. 6C, AC003374 and AC002603 (Groups 2 and 8, respectively) both achieved ˜81% reduction in human TSLP protein in serum of AAV transduced mice.

### Example 12. TSLP RNAi Agents in AAV9-CAG-hTSLP AAV Mouse Model

[0373] To evaluate certain TSLP RNAi agents, the same AAV9-CAG-hTSLP (Adeno-associated virus) mouse model as discussed in Example 4 was used.

[0374] The human TSLP mRNA expression was measured in the mice lung tissues by qPCR

[0375] At Day 1 and Day 3, each mouse (female C57Bl/6) was given an intratracheal (IT) administration of 50 μL AAV solutions containing 2e10 GC (genome copy) of AAV9-CAG-eGFP and 3e10 GC of AAV9-CAG-hTSLP in PBS. At Day 14 and Day 17, each mouse was given intratracheal administration of 50 μL of 0.4 mg/kg, 0.75 mg/kg, or 1.5 mg/kg of TSLP RNAi agents formulated in isotonic saline, or vehicle control (isotonic saline with no RNAi agent), according to the following Table 34. The mice were humanely sacrificed and harvested on Day 28.

TABLE 34
Targeted Positions and Dosing Groups of Example 12.

| | Targeted TSLP | | | |
|---|---|---|---|---|
| | Gene Position | | | |
| | (within SEQ ID | | RNAi Agent | |
| | NO: 1, GenBank | AAV dose | and Dose | |
| Group | NM_033035.5) | (Day 1, 3) | (Day 15, 18) | Dosing Regimen |
| 1 | N/A | 2e10 GC of AAV9- | Saline | IT doses of AAV on |
| | | CAG-eGFP and | | Day 1, 3; |
| | | 3e10 GC of AAV9- | | IT doses of saline on |
| | | CAG-hTSLP | | Days 14, 17 |
| 2 | 571 | 2e10 GC of AAV9- | 0.4 mg/kg | IT doses of AAV on |
| | | CAG-eGFP and | AC003374 | Day 1, 3; |
| | | 3e10 GC of AAV9- | | IT doses of RNAi |
| | | CAG-hTSLP | | agent on Days 14, 17 |
| 3 | 571 | 2e10 GC of AAV9- | 0.75 mg/kg | IT doses of AAV on |
| | | CAG-eGFP and | AC003374 | Day 1, 3; |
| | | 3e10 GC of AAV9- | | IT doses of RNAi |
| | | CAG-hTSLP | | agent on Days 14, 17 |
| 4 | 571 | 2e10 GC of AAV9- | 1.5 mg/kg | IT doses of AAV on |
| | | CAG-eGFP and | AC003374 | Day 1, 3; |
| | | 3e10 GC of AAV9- | | IT doses of RNAi |
| | | CAG-hTSLP | | agent on Days 14, 17 |
| 5 | 520 | 2e10 GC of AAV9- | 0.4 mg/kg | IT doses of AAV on |
| | | CAG-eGFP and | AC003456 | Day 1, 3; |
| | | 3e10 GC of AAV9- | | IT doses of RNAi |
| | | CAG-hTSLP | | agent on Days 14, 17 |
| 6 | 520 | 2e10 GC of AAV9- | 0.75 mg/kg | IT doses of AAV on |
| | | CAG-eGFP and | AC003456 | Day 1, 3; |
| | | 3e10 GC of AAV9- | | IT doses of RNAi |
| | | CAG-hTSLP | | agent on Days 14, 17 |
| 7 | 520 | 2e10 GC of AAV9- | 1.5 mg/kg | IT doses of AAV on |
| | | CAG-eGFP and | AC003456 | Day 1, 3; |
| | | 3e10 GC of AAV9- | | IT doses of RNAi |
| | | CAG-hTSLP | | agent on Days 14, 17 |
| 8 | 520 | 2e10 GC of AAV9- | 0.75 mg/kg | IT doses of AAV on |
| | | CAG-eGFP and | AC003342 | Day 1, 3; |
| | | 3e10 GC of AAV9- | | IT doses of RNAi |
| | | CAG-hTSLP | | agent on Days 14, 17 |

[0376] Each of the TSLP RNAi agents included modified nucleotides that were conjugated at the 5′ terminal end of the sense strand to an αvβ6 integrin targeting ligand having the modified sequences as set forth in the duplex structures herein. (See Tables 3, 4, 5, 6, 7A, 7B, 8, 9, 10, and 11 for specific modifications and structure information related to the TSLP RNAi agents, including Tri-SM6.1-αvβ6). The TSLP RNAi agents in Groups 2-8 each included nucleotide sequences that were designed to inhibit expression of a TSLP gene by targeting specific positions of TSLP mRNA as set forth in Table 34, above. (See. e.g., SEQ ID NO:1 and Table 2 for the TSLP mRNA sequence referenced.)

[0377] Five (5) mice were tested (n=5) for each group. Left lobe lungs were collected in 4% PFA for histology analysis. Lower right lobes were collected for human TSLP protein measurement by Meso Scale Discovery (MSD) Assay. All remaining right lobes were collected for TSLP mRNA expression measurement by qPCR Data from the experiment are shown in the following Table 35:

TABLE 35
Average Relative TSLP Normalized to Control in AAV-hTSLP Mice from Example 12.

| | Average Relative hTSLP | Low | High |
|---|---|---|---|
| Group ID | mRNA Expression | (error) | (error) |
| Group 1 (AAV IT Days 1, 3) (Saline IT Days 14, 17) | 1.000 | 0.189 | 0.233 |
| Group 2 (AAV IT Days 1, 3) (0.4 mg/kg AC003374 Days 14, 17) | 0.550 | 0.110 | 0.138 |
| Group 3 (AAV IT Days 1, 3) (0.75 mg/kg AC003374 Days 14, 17) | 0.382 | 0.052 | 0.060 |
| Group 4 (AAV IT Days 1, 3) (1.5 mg/kg AC003374 Days 14, 17) | 0.376 | 0.065 | 0.078 |
| Group 5 (AAV IT Days 1, 3) (0.4 mg/kg AC003456 Days 14, 17) | 0.544 | 0.124 | 0.160 |
| Group 6 (AAV IT Days 1, 3) (0.75 mg/kg AC003456 Days 14, 17) | 0.614 | 0.120 | 0.150 |
| Group 7 (AAV IT Days 1, 3) (1.5 mg/kg AC003456 Days 14, 17) | 0.583 | 0.105 | 0.128 |
| Group 8 (AAV IT Days 1, 3) (0.75 mg/kg AC003342 Days 14, 17) | 0.576 | 0.137 | 0.180 |

[0378] As shown in Table 35, above, each of the TSLP RNAi agents tested (Groups 2-8) showed reductions in hTSLP expression compared to control (Group 1). In particular, AC003374 (targeting position 571) achieved ˜62% inhibition (0.376) of TSLP mRNA at 1.5 mg/kg.

### Example 13. TSLP RNAi Agents in AAV9-CAG-hTSLP AAV Mouse Model

[0379] To evaluate certain TSLP RNAi agents, the same AAV9-CAG-hTSLP (Adeno-associated virus) mouse model as discussed in Example 4 was used.

[0380] The human TSLP CRNA expression was measured in the mice lung tissues by PCR

[0381] At Day 1 and Day 3, each mouse (female C57Bl/6) was given an intratracheal (IT) administration of 50 μL AAV solutions containing 2e10 GC (genome copy) of AAV9-CAG-eGFP and 3e10 GC of AAV9-CAG-hTSLP in PBS. At Day 17 and Day 20, each mouse was given intratracheal administration of 50 μL of 0.5 mg/kg or 1.0 mg/kg of TSLP RNAi agents formulated in isotonic saline, or vehicle control (isotonic saline with no RNAi agent), according to the following Table 36. The mice were humanely sacrificed and harvested on Day 29.

TABLE 36
Targeted Positions and Dosing Groups of Example 13.

| | Targeted TSLP | | | |
|---|---|---|---|---|
| | Gene Position | | | |
| | (within SEQ ID | | RNAi Agent | |
| | NO: 1, GenBank | AAV dose | and Dose | |
| Group | NM_033035.5) | (Day 1, 3) | (Day 15, 18) | Dosing Regimen |
| 1 | N/A | 2e10 GC of AAV9- | Saline | IT doses of AAV on |
| | | CAG-eGFP and | | Day 1, 3; |
| | | 3e10 GC of AAV9- | | IT doses of saline on |
| | | CAG-hTSLP | | Days 17, 20 |
| 2 | 571 | 2e10 GC of AAV9- | 0.5 mg/kg | IT doses of AAV on |
| | | CAG-eGFP and | AC003374 | Day 1, 3; |
| | | 3e10 GC of AAV9- | | IT doses of RNAi |
| | | CAG-hTSLP | | agent on Days 17, 20 |
| 3 | 571 | 2e10 GC of AAV9- | 1.0 mg/kg | IT doses of AAV on |
| | | CAG-eGFP and | AC003374 | Day 1, 3; |
| | | 3e10 GC of AAV9- | | IT doses of RNAi |
| | | CAG-hTSLP | | agent on Days 17, 20 |
| 4 | 571 | 2e10 GC of AAV9- | 0.5 mg/kg | IT doses of AAV on |
| | | CAG-eGFP and | AC003376 | Day 1, 3; |
| | | 3e10 GC of AAV9- | | IT doses of RNAi |
| | | CAG-hTSLP | | agent on Days 17, 20 |
| 5 | 571 | 2e10 GC of AAV9- | 1.0 mg/kg | IT doses of AAV on |
| | | CAG-eGFP and | AC003376 | Day 1, 3; |
| | | 3e10 GC of AAV9- | | IT doses of RNAi |
| | | CAG-hTSLP | | agent on Days 17, 20 |
| 6 | 571 | 2e10 GC of AAV9- | 0.5 mg/kg | IT doses of AAV on |
| | | CAG-eGFP and | AC003602 | Day 1, 3; |
| | | 3e10 GC of AAV9- | | IT doses of RNAi |
| | | CAG-hTSLP | | agent on Days 17, 20 |
| 7 | 571 | 2e10 GC of AAV9- | 1.0 mg/kg | IT doses of AAV on |
| | | CAG-eGFP and | AC003602 | Day 1, 3; |
| | | 3e10 GC of AAV9- | | IT doses of RNAi |
| | | CAG-hTSLP | | agent on Days 17, 20 |
| 8 | 571 | 2e10 GC of AAV9- | 0.5 mg/kg | IT doses of AAV on |
| | | CAG-eGFP and | AC003601 | Day 1, 3; |
| | | 3e10 GC of AAV9- | | IT doses of RNAi |
| | | CAG-hTSLP | | agent on Days 17, 20 |

[0382] Each of the TSLP RNAi agents included modified nucleotides that were conjugated at the 5′ terminal end of the sense strand to an αvβ6 integrin targeting ligand having the modified sequences as set forth in the duplex structures herein. (See Tables 3, 4, 5, 6, 7A, 7B, 8, 9, 10, and 11 for specific modifications and structure information related to the TSLP RNAi agents, including Tri-SM6.1-αvβ6). The TSLP RNAi agents in Groups 2-8 each included nucleotide sequences that were designed to inhibit expression of a TSLP gene by targeting specific positions of TSLP mRNA as set forth in Table 36, above. (See. e.g., SEQ ID NO:1 and Table 2 for the TSLP mRNA sequence referenced.)

[0383] Five (5) mice were tested (n=5) for each group. Left lobe lungs were collected in 4% PFA for histology analysis. Lower right lobes were collected for human TSLP protein measurement by Meso Scale Discovery (MSD) Assay. All remaining right lobes were collected for TSLP mRNA expression measurement by qPCR Data from the experiment are shown in the following Table 37:

TABLE 37
Average Relative TSLP Normalized to Control in AAV-hTSLP Mice from Example 13.

| | Average Relative hTSLP | Low | High |
|---|---|---|---|
| Group ID | mRNA Expression | (error) | (error) |
| Group 1 (AAV IT Days 1, 3) (Saline IT Days 17, 20) | 1.000 | 0.102 | 0.114 |
| Group 2 (AAV IT Days 1, 3) (0.5 mg/kg AC003374 IT Days 17, 20) | 0.969 | 0.108 | 0.121 |
| Group 3 (AAV IT Days 1, 3) (1.0 mg/kg AC003374 IT Days 17, 20) | 0.435 | 0.059 | 0.068 |
| Group 4 (AAV IT Days 1, 3) (0.5 mg/kg AC003376 IT Days 17, 20) | 0.697 | 0.120 | 0.144 |
| Group 5 (AAV IT Days 1, 3) (1.0 mg/kg AC003376 IT Days 17, 20) | 0.709 | 0.118 | 0.141 |
| Group 6 (AAV IT Days 1, 3) (0.5 mg/kg AC003602 IT Days 17, 20) | 0.733 | 0.204 | 0.283 |
| Group 7 (AAV IT Days 1, 3) (1.0 mg/kg AC003602 IT Days 17, 20) | 0.440 | 0.092 | 0.117 |
| Group 8 (AAV IT Days 1, 3) (0.5 mg/kg AC003601 IT Days 17, 20) | 0.748 | 0.184 | 0.245 |

[0384] As shown in Table 37, above, each of the TSLP RNAi agents tested (Groups 2-8) showed reductions in hTSLP expression compared to control (Group 1). In particular, AC003602 achieved ˜56% inhibition (0.440) of TSLP mRNA at 1.0 mg/kg.

### Example 14. TSLP RNAi Agents in AAV9-CAG-hTSLP AAV Mouse Model

[0385] To evaluate certain TSLP RNAi agents, the same AAV9-CAG-hTSLP (Adeno-associated virus) mouse model as discussed in Example 4 was used.

[0386] The human TSLP mRNA expression was measured in the mice lung tissues by qPCR

[0387] At Day 1 and Day 3, each mouse (female C57B6) was given an intratracheal (IT) administration of 50 μL AAV solutions containing 2e10 GC (genome copy) of AAV9-CAG-eGFP and 2e10 GC of AAV9-CAG-hTSLP in PBS. At Day 17 and Day 21, each mouse was given intratracheal administration of 50 μL of 1.5 mg/kg of TSLP RNAi agents formulated in isotonic saline, or vehicle control (isotonic saline with no RNAi agent), according to the following Table 38. The mice were humanely sacrificed and harvested on Day 31.

TABLE 38
Targeted Positions and Dosing Groups of Example 14.

| | Targeted TSLP | | | |
|---|---|---|---|---|
| | Gene Position | | | |
| | (within SEQ ID | | RNAi Agent | |
| | NO: 1, GenBank | AAV dose | and Dose | |
| Group | NM_033035.5) | (Day 1, 3) | (Day 15, 18) | Dosing Regimen |
| 1 | N/A | 2e10 GC of AAV9- | Saline | IT doses of AAV on |
| | | CAG-eGFP and | | Day 1, 3; |
| | | 2e10 GC of AAV9- | | IT doses of saline on |
| | | CAG-hTSLP | | Days 17, 21 |
| 2 | 571 | 2e10 GC of AAV9- | 1.5 mg/kg | IT doses of AAV on |
| | | CAG-eGFP and | AC003374 | Day 1, 3; |
| | | 2e10 GC of AAV9- | | IT doses of RNAi |
| | | CAG-hTSLP | | agent on Days 17, 21 |
| 3 | 571 | 2e10 GC of AAV9- | 1.5 mg/kg | IT doses of AAV on |
| | | CAG-eGFP and | AC003602 | Day 1, 3; |
| | | 2e10 GC of AAV9- | | IT doses of RNAi |
| | | CAG-hTSLP | | agent on Days 17, 21 |
| 4 | 398 | 2e10 GC of AAV9- | 1.5 mg/kg | IT doses of AAV on |
| | | CAG-eGFP and | AC003096 | Day 1, 3; |
| | | 2e10 GC of AAV9- | | IT doses of RNAi |
| | | CAG-hTSLP | | agent on Days 17, 21 |
| 5 | 515 | 2e10 GC of AAV9- | 1.5 mg/kg | IT doses of AAV on |
| | | CAG-eGFP and | AC003098 | Day 1, 3; |
| | | 2e10 GC of AAV9- | | IT doses of RNAi |
| | | CAG-hTSLP | | agent on Days 17, 21 |
| 6 | 413 | 2e10 GC of AAV9- | 1.5 mg/kg | IT doses of AAV on |
| | | CAG-eGFP and | AC003129 | Day 1, 3; |
| | | 2e10 GC of AAV9- | | IT doses of RNAi |
| | | CAG-hTSLP | | agent on Days 17, 21 |
| 7 | 568 | 2e10 GC of AAV9- | 1.5 mg/kg | IT doses of AAV on |
| | | CAG-eGFP and | AC003101 | Day 1, 3; |
| | | 2e10 GC of AAV9- | | IT doses of RNAi |
| | | CAG-hTSLP | | agent on Days 17, 21 |
| 8 | 571 | 2e10 GC of AAV9- | 1.5 mg/kg | IT doses of AAV on |
| | | CAG-eGFP and | AC004361 | Day 1, 3; |
| | | 2e10 GC of AAV9- | | IT doses of RNAi |
| | | CAG-hTSLP | | agent on Days 17, 21 |

[0388] Each of the TSLP RNAi agents included modified nucleotides that were conjugated at the 5′ terminal end of the sense strand to an αvβ6 integrin targeting ligand having the modified sequences as set forth in the duplex structures herein. (See Tables 3, 4, 5, 6, 7A, 7B, 8, 9, 10, and 11 for specific modifications and structure information related to the TSLP RNAi agents, including Tri-SM6.1-αvβ6). The TSLP RNAi agents in Groups 2-8 each included nucleotide sequences that were designed to inhibit expression of a TSLP gene by targeting specific positions of TSLP mRNA as set forth in Table 38, above. (See. e.g., SEQ ID NO:1 and Table 2 for the TSLP mRNA sequence referenced.)

[0389] Five (5) mice were tested (n=5) for each group. Left lobe lungs were collected in 4% PFA for histology analysis. Lower right lobes were collected for human TSLP protein measurement by Meso Scale Discovery (MSD) Assay. All remaining right lobes were collected for TSLP mRNA expression measurement by qPCR Data from the experiment are shown in the following Table 39:

TABLE 39
Average Relative TSLP Normalized to Control in AAV-hTSLP Mice from Example 14.

| | Average Relative hTSLP | Low | High |
|---|---|---|---|
| Group ID | mRNA Expression | (error) | (error) |
| Group 1 (AAV IT Days 1, 3) (Saline IT Days 17, 21) | 1.000 | 0.373 | 0.595 |
| Group 2 (AAV IT Days 1, 3) (1.5 mg/kg AC003374 IT Days 17, 21) | 0.402 | 0.129 | 0.191 |
| Group 3 (AAV IT Days 1, 3) (1.5 mg/kg AC003602 IT Days 17, 21) | 0.325 | 0.090 | 0.124 |
| Group 4 (AAV IT Days 1, 3) (1.5 mg/kg AC003096 IT Days 17, 21) | 0.525 | 0.116 | 0.149 |
| Group 5 (AAV IT Days 1, 3) (1.5 mg/kg AC003098 IT Days 17, 21) | 0.370 | 0.133 | 0.207 |
| Group 6 (AAV IT Days 1, 3) (1.5 mg/kg AC003129 IT Days 17, 21) | 0.451 | 0.098 | 0.125 |
| Group 7 (AAV IT Days 1, 3) (1.5 mg/kg AC003101 IT Days 17, 21) | 0.378 | 0.179 | 0.339 |
| Group 8 (AAV IT Days 1, 3) (1.5 mg/kg AC004361 IT Days 17, 21) | 0.280 | 0.077 | 0.107 |

[0390] As shown in Table 39, above, each of the TSLP RNAi agents tested (Groups 2-8) showed reductions in hTSLP expression compared to control (Group 1). In particular, AC003602 achieved ˜67% inhibition (0.325) of TSLP mRNA at 1.5 mg/kg, and AC004361 (also targeting position 571 of the TSLP gene) achieved ˜72% inhibition (0.280) of TSLP mRNA at 1.5 mg/kg.

### Example 15. TSLP RNAi Agents in AAV9-CAG-hTSLP AAV Mouse Model

[0391] To evaluate certain TSLP RNAi agents, the same AAV9-CAG-hTSLP (Adeno-associated virus) mouse model as discussed in Example 4 was used.

[0392] The human TSLP mRNA expression was measured in the mice lung tissues by qPCR

[0393] At Day 1 and Day 4, each mouse (female C57Bl/6) was given an intratracheal (IT) administration of 50 μL AAV solutions containing 2e10 GC (genome copy) of AAV9-CAG-eGFP and 3e10 GC of AAV9-CAG-hTSLP in PBS. At Day 20 and Day 22, each mouse was given intratracheal administration of 50 μL of 1.0 mg/kg of TSLP RNAi agents formulated in isotonic saline, or vehicle control (isotonic saline with no RNAi agent), according to the following Table 40. The mice were humanely sacrificed and harvested on Day 32.

TABLE 40
Targeted Positions and Dosing Groups of Example 15.

| | Targeted TSLP | | | |
|---|---|---|---|---|
| | Gene Position | | | |
| | (within SEQ ID | | RNAi Agent | |
| | NO: 1, GenBank | AAV dose | and Dose | |
| Group | NM_033035.5) | (Day 1, 3) | (Day 15, 18) | Dosing Regimen |
| 1 | N/A | 2e10 GC of AAV9- | Saline | IT doses of AAV on |
| | | CAG-eGFP and | | Day 1, 4; |
| | | 3e10 GC of AAV9- | | IT doses of saline on |
| | | CAG-hTSLP | | Days 20, 22 |
| 2 | 571 | 2e10 GC of AAV9- | 1.0 mg/kg | IT doses of AAV on |
| | | CAG-eGFP and | AC003602 | Day 1, 4; |
| | | 3e10 GC of AAV9- | | IT doses of RNAi |
| | | CAG-hTSLP | | agent on Days 20, 22 |
| 3 | 571 | 2e10 GC of AAV9- | 1.0 mg/kg | IT doses of AAV on |
| | | CAG-eGFP and | AC004376 | Day 1, 4; |
| | | 3e10 GC of AAV9- | | IT doses of RNAi |
| | | CAG-hTSLP | | agent on Days 20, 22 |
| 4 | 571 | 2e10 GC of AAV9- | 1.0 mg/kg | IT doses of AAV on |
| | | CAG-eGFP and | AC004363 | Day 1, 4; |
| | | 3e10 GC of AAV9- | | IT doses of RNAi |
| | | CAG-hTSLP | | agent on Days 20, 22 |
| 5 | 571 | 2e10 GC of AAV9- | 1.0 mg/kg | IT doses of AAV on |
| | | CAG-eGFP and | AC004373 | Day 1, 4; |
| | | 3e10 GC of AAV9- | | IT doses of RNAi |
| | | CAG-hTSLP | | agent on Days 20, 22 |
| 6 | 571 | 2e10 GC of AAV9- | 1.0 mg/kg | IT doses of AAV on |
| | | CAG-eGFP and | AC004374 | Day 1, 4; |
| | | 3e10 GC of AAV9- | | IT doses of RNAi |
| | | CAG-hTSLP | | agent on Days 20, 22 |
| 7 | 571 | 2e10 GC of AAV9- | 1.0 mg/kg | IT doses of AAV on |
| | | CAG-eGFP and | AC004358 | Day 1, 4; |
| | | 3e10 GC of AAV9- | | IT doses of RNAi |
| | | CAG-hTSLP | | agent on Days 20, 22 |
| 8 | 571 | 2e10 GC of AAV9- | 1.0 mg/kg | IT doses of AAV on |
| | | CAG-eGFP and | AC004361 | Day 1, 4; |
| | | 3e10 GC of AAV9- | | IT doses of RNAi |
| | | CAG-hTSLP | | agent on Days 20, 22 |

[0394] Each of the TSLP RNAi agents included modified nucleotides that were conjugated at the 5′ terminal end of the sense strand to an αvβ6 integrin targeting ligand having the modified sequences as set forth in the duplex structures herein. (See Tables 3, 4, 5, 6, 7A, 7B, 8, 9, 10, and 11 for specific modifications and structure information related to the TSLP RNAi agents, including Tri-SM6.1-αvβ6). The TSLP RNAi agents in Groups 2-8 each included nucleotide sequences that were designed to inhibit expression of a TSLP gene by targeting specific positions of TSLP mRNA as set forth in Table 40, above. (See. e.g., SEQ ID NO:1 and Table 2 for the TSLP mRNA sequence referenced.)

[0395] Five (5) mice were tested (n=5) for each group. Left lobe lungs were collected in 4% PFA for histology analysis. Lower right lobes were collected for human TSLP protein measurement by Meso Scale Discovery (MSD) Assay. All remaining right lobes were collected for TSLP mRNA expression measurement by qPCR Data from the experiment are shown in the following Table 41:

TABLE 41
Average Relative TSLP Normalized to Control in AAV-hTSLP Mice from Example 15.

| | Average Relative hTSLP | Low | High |
|---|---|---|---|
| Group ID | mRNA Expression | (error) | (error) |
| Group 1 (AAV IT Days 1, 4) (Saline IT Days 20, 22) | 1.000 | 0.182 | 0.223 |
| Group 2 (AAV IT Days 1, 4) (1.0 mg/kg AC003602 IT Days 20, 22) | 0.424 | 0.099 | 0.130 |
| Group 3 (AAV IT Days 1, 4) (1.0 mg/kg AC004376 IT Days 20, 22) | 0.371 | 0.084 | 0.108 |
| Group 4 (AAV IT Days 1, 4) (1.0 mg/kg AC004363 IT Days 20, 22) | 0.359 | 0.094 | 0.127 |
| Group 5 (AAV IT Days 1, 4) (1.0 mg/kg AC004373 IT Days 20, 22) | 0.411 | 0.091 | 0.116 |
| Group 6 (AAV IT Days 1, 4) (1.0 mg/kg AC004374 IT Days 20, 22) | 0.552 | 0.145 | 0.196 |
| Group 7 (AAV IT Days 1, 4) (1.0 mg/kg AC004358 IT Days 20, 22) | 0.383 | 0.109 | 0.152 |
| Group 8 (AAV IT Days 1, 4) (1.0 mg/kg AC004361 IT Days 20, 22) | 0.381 | 0.090 | 0.117 |

[0396] As shown in Table 41, above, each of the TSLP RNAi agents tested (Groups 2-8) showed reductions in hTSLP expression compared to control (Group 1).

[0397] Further, hTSLP protein expression was measured for each of the dosing groups by MSD assay from the lower right lobe of the mouse lung tissues collected, and the data from certain of the samples are shown in FIG. 7. As shown in FIG. 7, AC004376 achieved ˜79% reduction, AC004363 and AC004361 both achieved 73% reduction in human TSLP protein in AAV transduced mouse lungs at 1.0 mg/kg.

### Example 16. TSLP RNAi Agents in AAV9-CAG-hTSLP AAV Mouse Model

[0398] To evaluate certain TSLP RNAi agents, the same AAV9-CAG-hTSLP (Adeno-associated virus) mouse model as discussed in Example 4 was used.

[0399] The human TSLP mRNA expression was measured in the mice lung tissues by qPCR

[0400] At Day 1 and Day 3, each mouse (female C57Bl/6) was given an intratracheal (IT) administration of 50 μL AAV solutions containing 2e10 GC (genome copy) of AAV9-CAG-eGFP and 3e10 GC of AAV9-CAG-hTSLP in PBS. At Day 17 and Day 20, each mouse was given intratracheal administration of 50 μL of 1.0 mg/kg of TSLP RNAi agents formulated in isotonic saline, or vehicle control (isotonic saline with no RNAi agent), according to the following Table 42. The mice were humanely sacrificed and harvested on Day 31.

TABLE 42
Targeted Positions and Dosing Groups of Example 16.

| | Targeted TSLP | | | |
|---|---|---|---|---|
| | Gene Position | | | |
| | (within SEQ ID | | RNAi Agent | |
| | NO: 1, GenBank | AAV dose | and Dose | |
| Group | NM_033035.5) | (Day 1, 3) | (Day 15, 18) | Dosing Regimen |
| 1 | N/A | 2e10 GC of AAV9- | Saline | IT doses of AAV on |
| | | CAG-eGFP and | | Day 1, 3; |
| | | 3e10 GC of AAV9- | | IT doses of saline on |
| | | CAG-hTSLP | | Days 17, 20 |
| 2 | 571 | 2e10 GC of AAV9- | 1.0 mg/kg | IT doses of AAV on |
| | | CAG-eGFP and | AC003602 | Day 1, 3; |
| | | 3e10 GC of AAV9- | | IT doses of RNAi |
| | | CAG-hTSLP | | agent on Days 17, 20 |
| 3 | 571 | 2e10 GC of AAV9- | 1.0 mg/kg | IT doses of AAV on |
| | | CAG-eGFP and | AC004644 | Day 1, 3; |
| | | 3e10 GC of AAV9- | | IT doses of RNAi |
| | | CAG-hTSLP | | agent on Days 17, 20 |
| 4 | 571 | 2e10 GC of AAV9- | 1.0 mg/kg | IT doses of AAV on |
| | | CAG-eGFP and | AC004645 | Day 1, 3; |
| | | 3e10 GC of AAV9- | | IT doses of RNAi |
| | | CAG-hTSLP | | agent on Days 17, 20 |
| 5 | 571 | 2e10 GC of AAV9- | 1.0 mg/kg | IT doses of AAV on |
| | | CAG-eGFP and | AC004646 | Day 1, 3; |
| | | 3e10 GC of AAV9- | | IT doses of RNAi |
| | | CAG-hTSLP | | agent on Days 17, 20 |
| 6 | 571 | 2e10 GC of AAV9- | 1.0 mg/kg | IT doses of AAV on |
| | | CAG-eGFP and | AC004647 | Day 1, 3; |
| | | 3e10 GC of AAV9- | | IT doses of RNAi |
| | | CAG-hTSLP | | agent on Days 17, 20 |
| 7 | 571 | 2e10 GC of AAV9- | 1.0 mg/kg | IT doses of AAV on |
| | | CAG-eGFP and | AC004816 | Day 1, 3; |
| | | 3e10 GC of AAV9- | | IT doses of RNAi |
| | | CAG-hTSLP | | agent on Days 17, 20 |
| 8 | 571 | 2e10 GC of AAV9- | 1.0 mg/kg | IT doses of AAV on |
| | | CAG-eGFP and | AC004363 | Day 1, 3; |
| | | 3e10 GC of AAV9- | | IT doses of RNAi |
| | | CAG-hTSLP | | agent on Days 17, 20 |

[0401] Each of the TSLP RNAi agents included modified nucleotides that were conjugated at the 5′ terminal end of the sense strand to an αvβ6 integrin targeting ligand having the modified sequences as set forth in the duplex structures herein. (See Tables 3, 4, 5, 6, 7A, 7B, 8, 9, 10, and 11 for specific modifications and structure information related to the TSLP RNAi agents, including Tri-SM6.1-αvβ6). The TSLP RNAi agents in Groups 2-8 each included nucleotide sequences that were designed to inhibit expression of a TSLP gene by targeting specific positions of TSLP mRNA as set forth in Table 42, above. (See. e.g., SEQ ID NO:1 and Table 2 for the TSLP mRNA sequence referenced.)

[0402] Five (5) mice were tested (n=5) for each group. Left lobe lungs were collected in 4% PFA for histology analysis. Lower right lobes were collected for human TSLP protein measurement by Meso Scale Discovery (MSD) Assay. All remaining right lobes were collected for TSLP mRNA expression measurement by qPCR Data from the experiment are shown in the following Table 43:

TABLE 43
Average Relative TSLP Normalized to Control in AAV-hTSLP Mice from Example 16.

| | Average Relative hTSLP | Low | High |
|---|---|---|---|
| Group ID | mRNA Expression | (error) | (error) |
| Group 1. (AAV IT Days 1, 3) (Saline IT Days 17, 20) | 1.000 | 0.157 | 0.187 |
| Group 2. (AAV IT Days 1, 3) (1.0 mg/kg AC003602 IT Days 17, 20) | 0.476 | 0.091 | 0.112 |
| Group 3. (AAV IT Days 1, 3) (1.0 mg/kg AC004644 IT Days 17, 20) | 0.404 | 0.099 | 0.131 |
| Group 4. (AAV IT Days 1, 3) (1.0 mg/kg AC004645 IT Days 17, 20) | 0.355 | 0.047 | 0.055 |
| Group 5. (AAV IT Days 1, 3) (1.0 mg/kg AC004646 IT Days 17, 20) | 0.406 | 0.067 | 0.081 |
| Group 6. (AAV IT Days 1, 3) (1.0 mg/kg AC004647 IT Days 17, 20) | 0.541 | 0.113 | 0.143 |
| Group 7. (AAV IT Days 1, 3) (1.0 mg/kg AC004816 IT Days 17, 20) | 0.509 | 0.084 | 0.100 |
| Group 8. (AAV IT Days 1, 3) (1.0 mg/kg AC004363 IT Days 17, 20) | 0.376 | 0.097 | 0.130 |

[0403] As shown in Table 43, above, each of the TSLP RNAi agents tested (Groups 2-8) showed reductions in hTSLP expression compared to control (Group 1). In particular, AC004363 achieved ˜62% inhibition of TSLP mRNA at 1.0 mg/kg.

[0404] Further, hTSLP protein expression was measured for each of the dosing groups by MSD assay from the lower right lobe of the mouse lung tissues collected, and the data from certain of the samples are shown in FIG. 8. As shown in FIG. 8, AC003602 achieved ˜84% reduction, AC004645 achieved ˜83% reduction in human TSLP protein in AAV transduced mouse lungs at 1.0 mg/kg.

### Example 17. TSLP RNAi Agents in AAV9-CAG-hTSLP AAV Mouse Model

[0405] To evaluate certain TSLP RNAi agents, the same AAV9-CAG-hTSLP (Adeno-associated virus) mouse model as discussed in Example 4 was used.

[0406] The human TSLP mRNA expression was measured in the mice lung tissues by qPCR

[0407] At Day 1 and Day 4, each mouse (female C57Bl/6) was given an intratracheal (IT) administration of 50 μL AAV solutions containing 2e10 GC (genome copy) of AAV9-CAG-eGFP and 3e10 GC of AAV9-CAG-hTSLP in PBS. At Day 22 and Day 25, each mouse was given intratracheal administration of 50 μL of 1.0 mg/kg of TSLP RNAi agents formulated in isotonic saline, or vehicle control (isotonic saline with no RNAi agent), which included the Groups according to the following Table 44. The mice were humanely sacrificed and harvested on Day 36.

TABLE 44
Targeted Positions and Dosing Groups of Example 17.

| | Targeted TSLP | | | |
|---|---|---|---|---|
| | Gene Position | | | |
| | (within SEQ ID | | RNAi Agent | |
| | NO: 1, GenBank | AAV dose | and Dose | |
| Group | NM_033035.5) | (Day 1, 3) | (Day 15, 18) | Dosing Regimen |
| 1 | N/A | 2e10 GC of AAV9- | Saline | IT doses of AAV on |
| | | CAG-eGFP and | | Day 1, 4; |
| | | 3e10 GC of AAV9- | | IT doses of saline on |
| | | CAG-hTSLP | | Days 22, 25 |
| 2 | 571 | 2e10 GC of AAV9- | 1.0 mg/kg | IT doses of AAV on |
| | | CAG-eGFP and | AC003602 | Day 1, 4; |
| | | 3e10 GC of AAV9- | | IT doses of RNAi |
| | | CAG-hTSLP | | agent on Days 22, 25 |
| 3 | 571 | 2e10 GC of AAV9- | 1.0 mg/kg | IT doses of AAV on |
| | | CAG-eGFP and | AC004363 | Day 1, 4; |
| | | 3e10 GC of AAV9- | | IT doses of RNAi |
| | | CAG-hTSLP | | agent on Days 22, 25 |
| 4 | 571 | 2e10 GC of AAV9- | 1.0 mg/kg | IT doses of AAV on |
| | | CAG-eGFP and | AC004376 | Day 1, 4; |
| | | 3e10 GC of AAV9- | | IT doses of RNAi |
| | | CAG-hTSLP | | agent on Days 22, 25 |
| 5 | 571 | 2e10 GC of AAV9- | 1.0 mg/kg | IT doses of AAV on |
| | | CAG-eGFP and | AC004816 | Day 1, 4; |
| | | 3e10 GC of AAV9- | | IT doses of RNAi |
| | | CAG-hTSLP | | agent on Days 22, 25 |
| 6 | 571 | 2e10 GC of AAV9- | 1.0 mg/kg | IT doses of AAV on |
| | | CAG-eGFP and | AC004644 | Day 1, 4; |
| | | 3e10 GC of AAV9- | | IT doses of RNAi |
| | | CAG-hTSLP | | agent on Days 22, 25 |
| 7 | 571 | 2e10 GC of AAV9- | 1.0 mg/kg | IT doses of AAV on |
| | | CAG-eGFP and | AC004646 | Day 1, 4; |
| | | 3e10 GC of AAV9- | | IT doses of RNAi |
| | | CAG-hTSLP | | agent on Days 22, 25 |

[0408] Each of the TSLP RNAi agents included modified nucleotides that were conjugated at the 5′ terminal end of the sense strand to an αvβ6 integrin targeting ligand having the modified sequences as set forth in the duplex structures herein. (See Tables 3, 4, 5, 6, 7A, 7B, 8, 9, 10, and 11 for specific modifications and structure information related to the TSLP RNAi agents, including Tri-SM6.1-αvβ6). The TSLP RNAi agents in Groups 2-8 each included nucleotide sequences that were designed to inhibit expression of a TSLP gene by targeting specific positions of TSLP mRNA as set forth in Table 44, above. (See. e.g., SEQ ID NO:1 and Table 2 for the TSLP mRNA sequence referenced.)

[0409] Five (5) mice were tested (n=5) for each group. Left lobe lungs were collected in 4% PFA for histology analysis. Lower right lobes were collected for human TSLP protein measurement by Meso Scale Discovery (MSD) Assay. All remaining right lobes were collected for TSLP mRNA expression measurement by qPCR Data from the experiment are shown in the following Table 45:

TABLE 45
Average Relative TSLP Normalized to Control in AAV-hTSLP Mice from Example 17.

| | Average Relative hTSLP | Low | High |
|---|---|---|---|
| Group ID | mRNA Expression | (error) | (error) |
| Group 1. (AAV IT Days 1, 4) (Saline IT Days 22, 25) | 1.000 | 0.055 | 0.059 |
| Group 2. (AAV IT Days 1, 4) (1.0 mg/kg AC003602 IT Days 22, 25) | 0.375 | 0.052 | 0.060 |
| Group 3. (AAV IT Days 1, 4) (1.0 mg/kg AC004363 IT Days 22, 25) | 0.359 | 0.081 | 0.104 |
| Group 4. (AAV IT Days 1, 4) (1.0 mg/kg AC004376 IT Days 22, 25) | 0.324 | 0.066 | 0.083 |
| Group 5. (AAV IT Days 1, 4) (1.0 mg/kg AC004816 IT Days 22, 25) | 0.559 | 0.119 | 0.151 |
| Group 6. (AAV IT Days 1, 4) (1.0 mg/kg AC004644 IT Days 22, 25) | 0.501 | 0.078 | 0.092 |
| Group 7. (AAV IT Days 1, 4) (1.0 mg/kg AC004646 IT Days 22, 25) | 0.655 | 0.046 | 0.050 |

[0410] As shown in Table 45, above, each of the TSLP RNAi agents tested (Groups 2-8) showed reductions in hTSLP expression compared to control (Group 1). In particular, AC004376 achieved ˜67% inhibition (0.324) of TSLP mRNA at 1.0 mg/kg and AC003602 achieved ˜62% inhibition of TSLP mRNA at 1.0 mg/kg (0.375).

### Example 18. TSLP RNAi Agents in AAV9-CAG-hTSLP AAV Mouse Model

[0411] To evaluate certain TSLP RNAi agents, the same AAV9-CAG-hTSLP (Adeno-associated virus) mouse model as discussed in Example 4 was used.

[0412] The human TSLP miRNA expression was measured in the mice lung tissues by qPCR 203611 At Day 1 and Day 4, each mouse (female C57Bl/6) was given an intratracheal (IT) administration of 50 μL AAV solutions containing 2e10 GC (genome copy) of AAV9-CAG-eGFP and 2e10 GC of AAV9-CAG-hTSLP in PBS. At Day 20 and Day 22, each mouse was given intratracheal administration of 50 μL of 1.5 mg/kg of TSLP RNAi agents formulated in isotonic saline, or vehicle control (isotonic saline with no RNAi agent), according to the following Table 46. The mice were humanely sacrificed and harvested on Day 34.

TABLE 46
Targeted Positions and Dosing Groups of Example 18.

| | Targeted TSLP | | | |
|---|---|---|---|---|
| | Gene Position | | | |
| | (within SEQ ID | | RNAi Agent | |
| | NO: 1, GenBank | AAV dose | and Dose | |
| Group | NM_033035.5) | (Day 1, 3) | (Day 15, 18) | Dosing Regimen |
| 1 | N/A | 2e10 GC of AAV9- | Saline | IT doses of AAV on |
| | | CAG-eGFP and | | Day 1, 4; |
| | | 2e10 GC of AAV9- | | IT doses of saline on |
| | | CAG-hTSLP | | Days 20, 22 |
| 2 | 485 | 2e10 GC of AAV9- | 1.5 mg/kg | IT doses of AAV on |
| | | CAG-eGFP and | AC004565 | Day 1, 4; |
| | | 2e10 GC of AAV9- | | IT doses of RNAi |
| | | CAG-hTSLP | | agent on Days 20, 22 |
| 3 | 626 | 2e10 GC of AAV9- | 1.5 mg/kg | IT doses of AAV on |
| | | CAG-eGFP and | AC004566 | Day 1, 4; |
| | | 2e10 GC of AAV9- | | IT doses of RNAi |
| | | CAG-hTSLP | | agent on Days 20, 22 |
| 4 | 719 | 2e10 GC of AAV9- | 1.5 mg/kg | IT doses of AAV on |
| | | CAG-eGFP and | AC004567 | Day 1, 4; |
| | | 2e10 GC of AAV9- | | IT doses of RNAi |
| | | CAG-hTSLP | | agent on Days 20, 22 |
| 5 | 773 | 2e10 GC of AAV9- | 1.5 mg/kg | IT doses of AAV on |
| | | CAG-eGFP and | AC004568 | Day 1, 4; |
| | | 2e10 GC of AAV9- | | IT doses of RNAi |
| | | CAG-hTSLP | | agent on Days 20, 22 |
| 6 | 836 | 2e10 GC of AAV9- | 1.5 mg/kg | IT doses of AAV on |
| | | CAG-eGFP and | AC004569 | Day 1, 4; |
| | | 2e10 GC of AAV9- | | IT doses of RNAi |
| | | CAG-hTSLP | | agent on Days 20, 22 |
| 7 | 863 | 2e10 GC of AAV9- | 1.5 mg/kg | IT doses of AAV on |
| | | CAG-eGFP and | AC004570 | Day 1, 4; |
| | | 2e10 GC of AAV9- | | IT doses of RNAi |
| | | CAG-hTSLP | | agent on Days 20, 22 |
| 8 | 571 | 2e10 GC of AAV9- | 1.5 mg/kg | IT doses of AAV on |
| | | CAG-eGFP and | AC003602 | Day 1, 4; |
| | | 2e10 GC of AAV9- | | IT doses of RNAi |
| | | CAG-hTSLP | | agent on Days 20, 22 |

[0413] Each of the TSLP RNAi agents included modified nucleotides that were conjugated at the 5′ terminal end of the sense strand to an αvβ6 integrin targeting ligand having the modified sequences as set forth in the duplex structures herein. (See Tables 3, 4, 5, 6, 7A, 7B, 8, 9, 10, and 11 for specific modifications and structure information related to the TSLP RNAi agents, including Tri-SM6.1-αvβ6). The TSLP RNAi agents in Groups 2-8 each included nucleotide sequences that were designed to inhibit expression of a TSLP gene by targeting specific positions of TSLP mRNA as set forth in Table 46, above. (See. e.g., SEQ ID NO:1 and Table 2 for the TSLP mRNA sequence referenced.)

[0414] Five (5) mice were tested (n=5) for each group. Left lobe lungs were collected in 4% PFA for histology analysis. Lower right lobes were collected for human TSLP protein measurement by Meso Scale Discovery (MSD) Assay. All remaining right lobes were collected for TSLP mRNA expression measurement by qPCR Data from the experiment are shown in the following Table 47:

TABLE 47
Average Relative TSLP Normalized to Control in AAV-hTSLP Mice from Example 18.

| | Average Relative hTSLP | Low | High |
|---|---|---|---|
| Group ID | mRNA Expression | (error) | (error) |
| Group 1. (AAV IT Days 1, 4) (Saline IT Days 20, 22) | 1.000 | 0.314 | 0.458 |
| Group 2. (AAV IT Days 1, 4) (1.5 mg/kg AC004565 IT Days 20, 22) | 0.683 | 0.170 | 0.227 |
| Group 3. (AAV IT Days 1, 4) (1.5 mg/kg AC004566 IT Days 20, 22) | 0.448 | 0.125 | 0.174 |
| Group 4. (AAV IT Days 1, 4) (1.5 mg/kg AC004567 IT Days 20, 22) | 0.659 | 0.150 | 0.194 |
| Group 5. (AAV IT Days 1, 4) (1.5 mg/kg AC004568 IT Days 20, 22) | 0.400 | 0.091 | 0.097 |
| Group 6. (AAV IT Days 1, 4) (1.5 mg/kg AC004569 IT Days 20, 22) | 0.465 | 0.069 | 0.082 |
| Group 7. (AAV IT Days 1, 4) (1.5 mg/kg AC004570 IT Days 20, 22) | 0.564 | 0.160 | 0.224 |
| Group 8. (AAV IT Days 1, 4) (1.5 mg/kg AC003602 IT Days 20, 22) | 0.399 | 0.164 | 0.279 |

[0415] As shown in Table 47, above, each of the TSLP RNAi agents tested (Groups 2-8) showed reductions in hTSLP expression compared to control (Group 1). In particular, AC003602 and AC004568 achieved ˜60% inhibition of TSLP mRNA at 1.5 mg/kg (0.399 and 0.400, respectively).

[0416] Further, hTSLP protein expression was measured for each of the dosing groups by MSD assay from the lower right lobe of the mouse lung tissues collected, and the data from certain of the samples are shown in FIGS. 9A and 9B. As shown in FIG. 9A, AC004565 achieved ˜88% reduction in human TSLP protein in AAV transduced mouse lungs at 1.5 mg/kg. As shown in FIG. 9B, AC003602 achieved ˜83% reduction, and AC004566 achieved ˜66% reduction, in human TSLP protein in AAV transduced mouse serum at 1.5 mg/kg.

### Example 19. TSLP RNAi Agents in AAV9-CAG-hTSLP AAV Mouse Model

[0417] To evaluate certain TSLP RNAi agents, the same AAV9-CAG-hTSLP (Adeno-associated virus) mouse model as discussed in Example 4 was used.

[0418] The human TSLP mRNA expression was measured in the mice lung tissues by qPCR

[0419] At Day 1 and Day 4, each mouse (female C57Bl/6) was given an intratracheal (IT) administration of 50 μL AAV solutions containing 2e10 GC (genome copy) of AAV9-CAG-eGFP and 2e10 GC of AAV9-CAG-hTSLP in PBS. At Day 18 and Day 20, each mouse was given intratracheal administration of 50 μL of 1.5 mg/kg of TSLP RNAi agents formulated in isotonic saline, or vehicle control (isotonic saline with no RNAi agent), according to the following Table 48. The mice were humanely sacrificed and harvested on Day 32.

TABLE 48
Targeted Positions and Dosing Groups of Example 19.

| | Targeted TSLP | | | |
|---|---|---|---|---|
| | Gene Position | | | |
| | (within SEQ ID | | RNAi Agent | |
| | NO: 1, GenBank | AAV dose | and Dose | |
| Group | NM_033035.5) | (Day 1, 3) | (Day 15, 18) | Dosing Regimen |
| 1 | N/A | 2e10 GC of AAV9- | Saline | IT doses of AAV on |
| | | CAG-eGFP and | | Day 1, 4; |
| | | 2e10 GC of AAV9- | | IT doses of saline on |
| | | CAG-hTSLP | | Days 18, 20 |
| 2 | 836 | 2e10 GC of AAV9- | 1.5 mg/kg | IT doses of AAV on |
| | | CAG-eGFP and | AC004569 | Day 1, 4; |
| | | 2e10 GC of AAV9- | | IT doses of RNAi |
| | | CAG-hTSLP | | agent on Days 18, 20 |
| 3 | 863 | 2e10 GC of AAV9- | 1.5 mg/kg | IT doses of AAV on |
| | | CAG-eGFP and | AC004570 | Day 1, 4; |
| | | 2e10 GC of AAV9- | | IT doses of RNAi |
| | | CAG-hTSLP | | agent on Days 18, 20 |
| 4 | 992 | 2e10 GC of AAV9- | 1.5 mg/kg | IT doses of AAV on |
| | | CAG-eGFP and | AC004571 | Day 1, 4; |
| | | 2e10 GC of AAV9- | | IT doses of RNAi |
| | | CAG-hTSLP | | agent on Days 18, 20 |
| 5 | 1021 | 2e10 GC of AAV9- | 1.5 mg/kg | IT doses of AAV on |
| | | CAG-eGFP and | AC004572 | Day 1, 4; |
| | | 2e10 GC of AAV9- | | IT doses of RNAi |
| | | CAG-hTSLP | | agent on Days 18, 20 |
| 6 | 1040 | 2e10 GC of AAV9- | 1.5 mg/kg | IT doses of AAV on |
| | | CAG-eGFP and | AC004573 | Day 1, 4; |
| | | 2e10 GC of AAV9- | | IT doses of RNAi |
| | | CAG-hTSLP | | agent on Days 18, 20 |
| 7 | 1218 | 2e10 GC of AAV9- | 1.5 mg/kg | IT doses of AAV on |
| | | CAG-eGFP and | AC004574 | Day 1, 4; |
| | | 2e10 GC of AAV9- | | IT doses of RNAi |
| | | CAG-hTSLP | | agent on Days 18, 20 |
| 8 | 571 | 2e10 GC of AAV9- | 1.5 mg/kg | IT doses of AAV on |
| | | CAG-eGFP and | AC003602 | Day 1, 4; |
| | | 2e10 GC of AAV9- | | IT doses of RNAi |
| | | CAG-hTSLP | | agent on Days 18, 20 |

[0420] Each of the TSLP RNAi agents included modified nucleotides that were conjugated at the 5′ terminal end of the sense strand to an αvβ6 integrin targeting ligand having the modified sequences as set forth in the duplex structures herein. (See Tables 3, 4, 5, 6, 7A, 7B, 8, 9, 10, and 11 for specific modifications and structure information related to the TSLP RNAi agents, including Tri-SM6.1-αvβ6). The TSLP RNAi agents in Groups 2-8 each included nucleotide sequences that were designed to inhibit expression of a TSLP gene by targeting specific positions of TSLP mRNA as set forth in Table 48, above. (See. e.g., SEQ ID NO:1 and Table 2 for the TSLP mRNA sequence referenced.)

[0421] Five (5) mice were tested (n=5) for each group. Left lobe lungs were collected in 4% PFA for histology analysis. Lower right lobes were collected for human TSLP protein measurement by Meso Scale Discovery (MSD) Assay. All remaining right lobes were collected for TSLP mRNA expression measurement by qPCR Data from the experiment are shown in the following Table 49:

TABLE 49
Average Relative TSLP Normalized to Control in AAV-hTSLP Mice from Example 19.

| | Average Relative hTSLP | Low | High |
|---|---|---|---|
| Group ID | mRNA Expression | (error) | (error) |
| Group 1. (AAV IT Days 1, 4) (Saline IT Days 18, 20) | 1.000 | 0.097 | 0.107 |
| Group 2. (AAV IT Days 1, 4) (1.5 mg/kg AC004569 IT Days 18, 20) | 0.713 | 0.103 | 0.120 |
| Group 3. (AAV IT Days 1, 4) (1.5 mg/kg AC004570 IT Days 18, 20) | 0.665 | 0.140 | 0.178 |
| Group 4. (AAV IT Days 1, 4) (1.5 mg/kg AC004571 IT Days 18, 20) | 0.506 | 0.078 | 0.093 |
| Group 5. (AAV IT Days 1, 4) (1.5 mg/kg AC004572 IT Days 18, 20) | 0.534 | 0.086 | 0.103 |
| Group 6. (AAV IT Days 1, 4) (1.5 mg/kg AC004573 IT Days 18, 20) | 0.383 | 0.086 | 0.111 |
| Group 7. (AAV IT Days 1, 4) (1.5 mg/kg AC004574 IT Days 18, 20) | 0.400 | 0.038 | 0.042 |
| Group 8. (AAV IT Days 1, 4) (1.5 mg/kg AC003602 IT Days 18, 20) | 0.404 | 0.044 | 0.049 |

[0422] As shown in Table 49, above, each of the TSLP RNAi agents tested (Groups 2-8) showed reductions in hTSLP expression compared to control (Group 1).

[0423] Further, hTSLP protein expression was measured for each of the dosing groups by MSD assay from the lower right lobe of the mouse lung tissues collected, and the data from certain of the samples are shown in FIGS. 10A and 10B. As shown in FIG. 10A, AC003602 achieved ˜87% reduction, AC004573 achieved ˜79% reduction, in human TSLP protein in AAV transduced mouse lungs at 1.5 mg/kg. As shown in FIG. 10B, AC003602 achieved ˜76% reduction, and AC004574 achieved ˜65% reduction, in human TSLP protein in AAV transduced mouse serum at 1.5 mg/kg.

### Example 20. TSLP-SEAP Mouse Model

[0424] To evaluate TSLP RNAi agents, a TSLP-SEAP mouse model was used. C57bl6/Albino female mice were transiently transfected in vivo with plasmid by hydrodynamic tail vein (HTV) injection. Mice were injected, via hydrodynamic tail vein (HTV) injection, with plasmid pMIR0962 containing the nucleotides 179-2610 of the TSLP cDNA sequence (GenBank NM_033035.5 (SEQ ID NO:1)) inserted into the 3′ UTR of the SEAP (secreted human placental alkaline phosphatase) reporter gene. 20 μg of the plasmid containing the TSLP cDNA in Ringer's solution in a total volume of 10% of the animal's body weight was injected, via HTV, to create TSLP-SEAP model mice. Following transfection with TSLP-SEAP, the mice were subsequently administered TSLP RNAi agents. Inhibition of TSLP gene expression by TSLP RNAi agent results in concomitant inhibition of SEAP expression. SEAP expression levels were measured by Phospha-Light™ SEAP Reporter Gene Assay System (ThermoFisher Cat #T1016). Prior to treatment, SEAP expression levels in serum were measured and the mice were grouped according to average SEAP levels.

[0425] Analyses: SEAP levels may be measured at various times, both before and after administration of TSLP RNAi agents.

[0426] i) Serum collection: Mice were anesthetized with 2-3% isoflurane and blood samples were collected from the submandibular area into serum separation tubes (Sarstedt AG & Co., Nümbrecht, Germany). Blood was allowed to coagulate at ambient temperature for 20 min. The tubes were centrifuged at 8,000×g for 3 min to separate the serum and stored at 4° C.

[0427] ii) Serum SEAP levels: Serum was collected and measured by the Phospha-Light™ SEAP Reporter Gene Assay System (ThermoFisher) according to the manufacturer's instructions. Serum SEAP levels for each animal was normalized to the control group of mice injected with saline in order to account for the non-treatment related decline in TSLP sequence expression with this model. First, the SEAP level for each animal at a time point was divided by the pre-treatment level of expression in that animal (“pre-treatment”) in order to determine the ratio of expression “normalized to pre-treatment”. Expression at a specific time point was then normalized to the control group by dividing the “normalized to pre-treatment” ratio for an individual animal by the average “normalized to pre-treatment” ratio of all mice in the normal saline control group. Alternatively, in some Examples set forth herein, the serum SEAP levels for each animal were assessed by normalizing to pre-treatment levels only.

[0428] To evaluate the activity of TSLP RNAi agents in a SEAP model as described in the Examples below, certain TSLP RNAi agents were conjugated to an N-Acetyl-galactosamine-containing targeting ligand having the chemical structure referred to as NAG37 (see Table 11 for structure information), as shown in Tables 5, 6, and 10. NAG37 is known to have high affinity to bind to asialoglycoprotein receptors that are abundantly expressed on liver cells, including hepatocytes (see International Patent Application Publication No WO2018044350A1). The use of NAG37-conjugated TSLP RNAi agents was to evaluate the expression of SEAP in the liver.

### Example 21. In Vivo Administration of TSLP RNAi Agents in TSLP-SEAP Mice

[0429] The TSLP-SEAP model described in Example 20, above, was used. On Day −21, four (n=4) female C57bl/6 albino mice animals were dosed with 20 ug pMIR0962 TSLP-SEAP hydrodynamic tail vein (HTV) injection. On Day 1, the mice test animals were dosed with either isotonic saline or TSLP RNAi agents formulated in saline (at 0.5 mg/kg, 1.0 mg/kg, or 1.5 mg/kg), via subcutaneous (SQ) injection, at 250 μL per 25 g body weight injection volume. The dosing regimen is in accordance with Table 50 below.

TABLE 50
Dosing for mice animals of Example 21.

| | | Targeted | |
|---|---|---|---|
| | | Position of | |
| | | TSLP (Seq | |
| Group | Dose (RNAi Agent) | ID No. 1) | Dosing Route |
| 1 | Saline | N/A | Day 1 SQ Injection |
| 2 | 0.5 mg/kg AC003679 | 571 | Day 1 SQ Injection |
| 3 | 1.0 mg/kg AC003679 | 571 | Day 1 SQ Injection |
| 4 | 1.5 mg/kg AC003679 | 571 | Day 1 SQ Injection |
| 5 | 0.5 mg/kg AC003989 | 520 | Day 1 SQ Injection |
| 6 | 1.0 mg/kg AC003989 | 520 | Day 1 SQ Injection |
| 7 | 1.5 mg/kg AC003989 | 520 | Day 1 SQ Injection |
| 8 | 0.5 mg/kg AC003923 | 571 | Day 1 SQ Injection |
| 9 | 1.0 mg/kg AC003923 | 571 | Day 1 SQ Injection |
| 10 | 0.5 mg/kg AC003920 | 571 | Day 1 SQ Injection |
| 11 | 1.0 mg/kg AC003920 | 571 | Day 1 SQ Injection |
| 12 | 1.5 mg/kg AC003920 | 571 | Day 1 SQ Injection |

[0430] For the purposes of evaluating efficacy of the TSLP RNAi agents and the SEAP assay of the instant Example, AC003679 is conjugated to NAG37 (see Table 11 for structure information); NAG37 is known to have high affinity to bind to asialoglycoprotein receptors that are abundantly expressed on liver cells, including hepatocytes. AC003679 was chemically modified as follows:

Modified Sense Strand (5′→3′):
(SEQ ID NO: 775)
(NAG37)s(invAb)sagucacaaCfCfAfauaaaugucus(invAb)
Modified Antisense Strand (5′→3′):
(SEQ ID NO: 652)
asGfsacauuuaUfuGfgUfuGfugacsu

[0431] For the purposes of evaluating efficacy of the TSLP RNAi agents and the SEAP assay of the instant Example, AC003989 is conjugated to NAG37 (see Table 11 for structure information); NAG37 is known to have high affinity to bind to asialoglycoprotein receptors that are abundantly expressed on liver cells, including hepatocytes. AC003989 was chemically modified as follows:

Modified Sense Strand (5′→3′):
(SEQ ID NO: 774)
(NAG37)s(invAb)sggaaacucAfGfAfuaaaugcuaas(invAb)
Modified Antisense Strand (5′→3′):
(SEQ ID NO: 628)
cPrpusUfsagCfauuUfauCfuGfaguuucsc

[0432] For the purposes of evaluating efficacy of the TSLP RNAi agents and the SEAP assay of the instant Example, AC003920 is conjugated to NAG37 (see Table 11 for structure information); NAG37 is known to have high affinity to bind to asialoglycoprotein receptors that are abundantly expressed on liver cells, including hepatocytes. AC003920 was chemically modified as follows:

Modified Sense Strand (5′→3′):
(SEQ ID NO: 760)
(NAG37)s(invAb)sggucacaaCfCfAfauaaaugucus(invAb)
Modified Antisense Strand (5′→3′):
(SEQ ID NO: 653)
asGfsacauuuaUfuGfgUfuGfugacsc

[0433] Serum was collected on Day −7, 1, 8, 15, and 22. SEAP expression levels were determined pursuant to the procedure set forth in Example 20, above. Data from the experiment are shown in the following Table 51, with average SEAP reflecting the normalized average value of SEAP.

TABLE 51
Average SEAP normalized to pre-treatment and saline
control in TSLP-SEAP mice of Example 21.

| | Day 8 | | Day 15 | | Day 22 | |
|---|---|---|---|---|---|---|
| | Avg | Std | Avg | Std | Avg | Std |
| Group ID | SEAP | Dev | SEAP | Dev | SEAP | Dev |
| 1. Saline | 1.000 | 0.377 | 1.000 | 0.520 | 1.000 | 0.681 |
| 2. 0.5 mg/kg AC003679 | 0.379 | 0.039 | 0.259 | 0.125 | 0.215 | 0.048 |
| 3. 1.0 mg/kg AC003679 | 0.277 | 0.125 | 0.307 | 0.383 | 0.167 | 0.150 |
| 4. 1.5 mg/kg AC003679 | 0.146 | 0.026 | 0.125 | 0.107 | 0.065 | 0.024 |
| 5. 0.5 mg/kg AC003989 | 0.360 | 0.093 | 0.291 | 0.152 | 0.347 | 0.282 |
| 6. 1.0 mg/kg AC003989 | 0.251 | 0.112 | 0.119 | 0.051 | 0.121 | 0.020 |
| 7. 1.5 mg/kg AC003989 | 0.127 | 0.026 | 0.123 | 0.078 | 0.102 | 0.049 |
| 8. 0.5 mg/kg AC003923 | 0.224 | 0.021 | 0.243 | 0.130 | 0.162 | 0.070 |
| 9. 1.0 mg/kg AC003923 | 0.179 | 0.020 | 0.127 | 0.028 | 0.138 | 0.027 |
| 10. 0.5 mg/kg AC003920 | 0.257 | 0.069 | 0.127 | 0.064 | 0.086 | 0.055 |
| 11. 1.0 mg/kg AC003920 | 0.196 | 0.011 | 0.130 | 0.025 | 0.100 | 0.029 |
| 12. 1.5 mg/kg AC003920 | 0.130 | 0.005 | 0.041 | 0.014 | 0.025 | 0.025 |

[0434] Groups 2-12 showed reduction in SEAP-TSLP at all time points (Day 8, 15, and 22) compared to the saline control Group 1. More specifically, AC003920 achieved ˜97% inhibition at 1.5 mg/kg on Day 22 in this model.

### Example 22. In Vivo Anti-Inflammatory Effect of TSLP Knock-Down in Rat Model of Airway Inflammation, Delivery Via Intra-Tracheal Microsprayer

[0435] On study day 1 and day 3, male Brown-Norway rats were administered a dose of 5 mg/kg of a rat-specific RNAi agent linked to a Tri-SM6.1-αvβ6 integrin targeting ligand (referred to as AC001714 or AC002515), or saline vehicle. Additionally, a “RISC-blocked” RNAi trigger was used, which include a construct similar to AC001714, including the same targeting ligand, but included chemical modifications designed to prevent the loading of the antisense strand into RISC, thus serving as a negative control. Volume of 200 μL was loaded into a syringe that was connected to a microsprayer device (Penn Century, Philadelphia, PA) for intra-tracheal administration.

[0436] AC001714 and AC002515 include a rat-specific sequence designed to target the rat TSLP transcript (NCBI GenBank XM_008772052.2) and does not have homology with the human TSLP gene, the chemical structure of which is shown above in Example 2 and 3.

[0437] On day 15, rats were challenged with a single intra-tracheal dose of 500 μg/rat of Alternaria alternata prepared in PBS. Rats in Group 1 were administered only with PBS as a control.

TABLE 52
Rat-specific TSLP RNAi Agent and Dosing for Example 22.

| | AC | Animals | Harvest/ |
|---|---|---|---|
| | Duplex | per | Sacrifice |
| Group ID | Number | Group | Day |
| Group 1 (saline IT days 1, 3) (PBS IT day 15) | N/A | 5 | Day 16 |
| Group 2 (saline IT days 1, 3) (Alternaria | N/A | 5 | Day 16 |
| IT day 15) | | | |
| Group 3 (saline IT days 1, 3) (IT dose 5.0 | RISC-blocked | 5 | Day 16 |
| mg/kg RISC-blocked trigger on days 1, 3)/ | RNAi Trigger | | |
| (Alternaria IT day 15) | | | |
| Group 4 (IT dose 5.0 mg/kg AC001714 on days | AC001714 | 5 | Day 16 |
| 1, 3)/(Alternaria IT day 15) | | | |
| Group 5 (IT dose 5.0 mg/kg AC002515 on days | AC002515 | 5 | Day 16 |
| 1, 3)/(Alternaria IT day 15) | | | |

[0438] After 24 hours post-administration of the Alternaria (i.e., day 16), rats were anesthetized with isoflurane/02, blood was drawn, and were euthanized by exsanguination. Days of sacrifice/euthanasia are shown in Table 14 above. Trachea was canulated and bronchoalveolar lavage (BAL) collected after washing with 2×5 mL of ice-cold PBS. BAL samples were spun down, cells resuspended with 1 mL of ice-cold PBS, and aliquot was mixed with Turk's solution (ratio 1:1), and total cell counted via hemocytomers. Cytospins were prepared, stained and differential cell counting performed. Supernatant was used for cytokine measurements. Right lung lobes were used to determine rTSLP mRNA expression and left lung lobes were collected in 4% PFA/PBS for histology (Trichrome and Sirius Red Staining, RNAscope).

[0439] The rat lungs were inflated, fixed in 4% PFA and processed for mRNA in situ hybridization and immunohistochemistry. TSLP RNAscope shows TSLP is expressed in airway and alveolar. Z-stack confocal scan images show TSLP transcript retained in the nucleus, showing that silencing of cytoplasmic TSLP mRNA does not reduce pre-mRNA retained in the nucleus.

### Example 23. Passive Uptake of TSLP RNAI Agents in Human Precision Cut Lung Slices (PCLS)

[0440] Precision cut tissue slices (PCLS) represent an ex vivo model and tool for studying the structure and function of the lung in its native 3D environment, allowing for examination of the natural interactions between cells, molecules, and the extracellular matrix (ECM) ex vivo (Alsafadi H. N. et al, Am J Respir Cell Mol Biol 62(6): 681-691 (2020)). PCLS can be generated from various anatomical locations of the lung (distal and proximal), and from different species, including rodents, pigs, monkeys, and humans. To validate the RNAi agent potency for silencing human TSLP mRNA, fresh agarose inflated lung slices from one (1) healthy human donor were used for examination.

[0441] Saline or TSLP RNAi agents were added to cell media, with daily media changes. The PCLS were cultured in the media from Day 1 to Day 7 and harvested at Day 8. PCLS were cultured and dosed with TSLP RNAi agents in accordance with the following Table 53.

[0442] RNAi agent AC003609, a “RISC-blocked” RNAi agent, includes chemical modifications designed to prevent the loading of the antisense strand into RISC, thus serving as a negative control.

TABLE 53
Dosing groups and dosing regimen of
TSLP RNAi agents from Example 23.

| | Dosing | # PCLS Samples |
|---|---|---|
| Group ID | Regimen | (n=) per Group |
| Group 1. Saline | Treatment daily in the | n = 6 |
| | cell media for 7 days | |
| Group 2. AC003374 10 μM | Treatment daily in the | n = 6 |
| | cell media for 7 days | |
| Group 3. AC003374 1 μM | Treatment daily in the | n = 6 |
| | cell media for 7 days | |
| Group 4. AC003374 0.1 μM | Treatment daily in the | n = 6 |
| | cell media for 7 days | |
| Group 5. AC003602 10 μM | Treatment daily in the | n = 6 |
| | cell media for 7 days | |
| Group 6. AC003602 1 μM | Treatment daily in the | n = 6 |
| | cell media for 7 days | |
| Group 7. AC003602 0.1 μM | Treatment daily in the | n = 6 |
| | cell media for 7 days | |
| Group 8. AC003546 10 μM | Treatment daily in the | n = 6 |
| | cell media for 7 days | |
| Group 9. AC003546 1 μM | Treatment daily in the | n = 6 |
| | cell media for 7 days | |
| Group 10. AC003546 0.1 μM | Treatment daily in the | n = 6 |
| | cell media for 7 days | |
| Group 11. AC003609 10 μM | Treatment daily in the | n = 6 |
| | cell media for 7 days | |

[0443] TSLP miRNA expression was quantitated by qPCR, using PPIA as endogenous control gene, and normalized to Group 1 samples dosed with saline. qPCR relative expression data are shown in the following Table 54.

TABLE 54
Relative TSLP expression in PCLS, normalized
to vehicle control, of Example 23.

| | Day 8 | | |
|---|---|---|---|
| | Rel. | Error | Error |
| Group ID | Exp. | Low | High |
| 1. Saline | 1.000 | 0.189 | 0.233 |
| 2. AC003374 10 μM | 0.256 | 0.087 | 0.132 |
| 3. AC003374 1 μM | 0.320 | 0.095 | 0.135 |
| 4. AC003374 0.1 μM | 0.453 | 0.116 | 0.156 |
| 5. AC003602 10 μM | 0.325 | 0.067 | 0.085 |
| 6. AC003602 1 μM | 0.405 | 0.100 | 0.132 |
| 7. AC003602 0.1 μM | 0.524 | 0.104 | 0.130 |
| 8. AC003546 10 μM | 0.198 | 0.070 | 0.107 |
| 9. AC003546 1 μM | 0.279 | 0.047 | 0.057 |
| 10. AC003546 0.1 μM | 0.288 | 0.060 | 0.076 |
| 11. AC003609 10 μM | 0.830 | 0.155 | 0.190 |

[0444] Effective passive uptake of TSLP RNAi agents was observed. PCLS cultures treated with TSLP RNAi agents showed significant silencing of hTSLP mRNA. Groups 2-10 showed inhibition of TSLP at Day 8. More specifically, AC003546 at 10 μM achieved ˜80% inhibition (0.198) on Day 8. Furthermore, dose response was observed for AC003374, AC003602, and AC003546.

### Example 24. Passive Uptake of TSLP RNAI Agents in Human Precision Cut Lung Slices (PCLS)

[0445] Precision cut tissue slices (PCLS) represent an ex vivo model and tool for studying the structure and function of the lung in its native 3D environment, allowing for examination of the natural interactions between cells, molecules, and the extracellular matrix (ECM) ex vivo (Alsafadi H. N. et al, Am J Respir Cell Mol Biol 62(6): 681-691 (2020)). PCLS can be generated from various anatomical locations of the lung (distal and proximal), and from different species, including rodents, pigs, monkeys, and humans. To validate the RNAi agent potency for silencing human TSLP mRNA, fresh agarose inflated lung slices from asthmatic patient donor were used for examination.

[0446] Saline or TSLP RNAi agents were added to cell media, with daily media changes. The PCLS were cultured in the media from Day 1 to Day 7 and harvested at Day 8. PCLS were cultured and dosed with TSLP RNAi agents in accordance with the following Table 55.

TABLE 55
Dosing groups and dosing regimen of
TSLP RNAi agents from Example 24.

| | Dosing | # PCLS Samples |
|---|---|---|
| Group ID | Regimen | (n=) per Group |
| Group 1. Saline | Treatment daily in the | n = 6 |
| | cell media for 7 days | |
| Group 2. AC003253 10 μM | Treatment daily in the | n = 6 |
| | cell media for 7 days | |
| Group 3. AC003253 1 μM | Treatment daily in the | n = 6 |
| | cell media for 7 days | |
| Group 4. AC003253 0.1 μM | Treatment daily in the | n = 6 |
| | cell media for 7 days | |
| Group 5. AC003374 10 μM | Treatment daily in the | n = 6 |
| | cell media for 7 days | |
| Group 6. AC003374 1 μM | Treatment daily in the | n = 6 |
| | cell media for 7 days | |
| Group 7. AC003374 0.1 μM | Treatment daily in the | n = 6 |
| | cell media for 7 days | |
| Group 8. AC003546 10 μM | Treatment daily in the | n = 6 |
| | cell media for 7 days | |
| Group 9. AC003546 1 μM | Treatment daily in the | n = 6 |
| | cell media for 7 days | |
| Group 10. AC003546 0.1 μM | Treatment daily in the | n = 6 |
| | cell media for 7 days | |
| Group 11. AC001651 10 μM | Treatment daily in the | n = 6 |
| | cell media for 7 days | |

[0447] AC001651 is an RNAi agent designed to initiate RISC and inhibit gene expression of a different gene, and not targeted to the hTSLP gene.

[0448] TSLP mRNA expression was quantitated by qPCR, using B2M as endogenous control gene, and normalized to Group 1 samples dosed with saline. qPCR relative expression data are shown in the following Table 56.

TABLE 56
Relative TSLP expression in PCLS, normalized
to vehicle control, of Example 24.

| | Day 8 | | |
|---|---|---|---|
| | Rel. | Error | Error |
| Group ID | Exp. | Low | High |
| 1. Saline | 1.000 | 0.190 | 0.234 |
| 2. AC003253 10 μM | 0.555 | 0.182 | 0.270 |
| 3. AC003253 1 μM | 0.675 | 0.339 | 0.681 |
| 4. AC003253 0.1 μM | 0.790 | 0.143 | 0.175 |
| 5. AC003374 10 μM | 0.362 | 0.082 | 0.107 |
| 6. AC003374 1 μM | 0.531 | 0.157 | 0.223 |
| 7. AC003374 0.1 μM | 0.918 | 0.352 | 0.570 |
| 8. AC003546 10 μM | 0.489 | 0.174 | 0.270 |
| 9. AC003546 1 μM | 0.403 | 0.097 | 0.127 |
| 10. AC003546 0.1 μM | 0.652 | 0.228 | 0.350 |
| 11. AC001651 10 μM | 0.913 | 0.211 | 0.274 |

[0449] Effective passive uptake of TSLP RNAi agents was observed. PCLS cultures treated with TSLP RNAi agents showed silencing of hTSLP mRNA. Groups 2-6 and 8-10 showed inhibition of TSLP at Day 8. Groups 7 and 11 showed negligible inhibition. More specifically, AC003374 at 10 μM achieved ˜63% inhibition (0.362) on Day 8. Furthermore, dose response was observed for AC003253 and AC003374.

### Example 25. TSLP RNAi Agents in AAV9-CAG-hTSLP AAV Mouse Model

[0450] To evaluate certain TSLP RNAi agents, the same AAV9-CAG-hTSLP (Adeno-associated virus) mouse model as discussed in Example 4 was used.

[0451] The human TSLP mRNA expression was measured in the mice lung tissues by qPCR

[0452] At Day −17 and Day −14, each mouse (female C57Bl/6) was given an intratracheal (IT) administration of 50 μL AAV solutions containing 2e10 GC (genome copy) of AAV9-CAG-eGFP and 2e10 GC of AAV9-CAG-hTSLP in PBS. At Day 1 and Day 3, each mouse was given intratracheal administration of 50 μL (at 0.75, 1.5, or 3.0 mg/kg) of TSLP RNAi agents formulated in isotonic saline, or vehicle control (isotonic saline with no RNAi agent), according to the following Table 57. The mice were humanely sacrificed and harvested on Day 15.

TABLE 57
Dosing Groups of Example 25.

| | | RNAi Agent | | # |
|---|---|---|---|---|
| | AAV dose | and Dose | | Animals |
| Group | (Day −17, −14) | (Day 1, 3) | Dosing Regimen | (n=) |
| 1 | 2e10 GC of | Saline | IT doses of AAV | n = 5 |
| | AAV9-CAG- | | on Day −17, −14; | |
| | eGFP and 2e10 | | IT doses of saline | |
| | GC of AAV9- | | on Days 1, 3 | |
| | CAG-hTSLP | | | |
| 2 | 2e10 GC of | 0.75 mg/kg | IT doses of AAV | n = 5 |
| | AAV9-CAG- | AC003374 | on Day −17, −14; | |
| | eGFP and 2e10 | | IT doses of RNAi | |
| | GC of AAV9- | | agent on Days 1, 3 | |
| | CAG-hTSLP | | | |
| 3 | 2e10 GC of | 1.5 mg/kg | IT doses of AAV | n = 5 |
| | AAV9-CAG- | AC003374 | on Day −17, −14; | |
| | eGFP and 2e10 | | IT doses of RNAi | |
| | GC of AAV9- | | agent on Days 1, 3 | |
| | CAG-hTSLP | | | |
| 4 | 2e10 GC of | 3.0 mg/kg | IT doses of AAV | n = 5 |
| | AAV9-CAG- | AC003374 | on Day −17, −14; | |
| | eGFP and 2e10 | | IT doses of RNAi | |
| | GC of AAV9- | | agent on Days 1, 3 | |
| | CAG-hTSLP | | | |
| 5 | 2e10 GC of | 0.75 mg/kg | IT doses of AAV | n = 5 |
| | AAV9-CAG- | AC004361 | on Day −17, −14; | |
| | eGFP and 2e10 | | IT doses of RNAi | |
| | GC of AAV9- | | agent on Days 1, 3 | |
| | CAG-hTSLP | | | |
| 6 | 2e10 GC of | 1.5 mg/kg | IT doses of AAV | n = 5 |
| | AAV9-CAG- | AC004361 | on Day −17, −14; | |
| | eGFP and 2e10 | | IT doses of RNAi | |
| | GC of AAV9- | | agent on Days 1, 3 | |
| | CAG-hTSLP | | | |
| 7 | 2e10 GC of | 3.0 mg/kg | IT doses of AAV | n = 5 |
| | AAV9-CAG- | AC004361 | on Day −17, −14; | |
| | eGFP and 2e10 | | IT doses of RNAi | |
| | GC of AAV9- | | agent on Days 1, 3 | |
| | CAG-hTSLP | | | |
| 8 | 2e10 GC of | 1.5 mg/kg | IT doses of AAV | n = 5 |
| | AAV9-CAG- | AC005945 | on Day −17, −14; | |
| | eGFP and 2e10 | | IT doses of RNAi | |
| | GC of AAV9- | | agent on Days 1, 3 | |
| | CAG-hTSLP | | | |

[0453] Each of the TSLP RNAi agents included modified nucleotides that were conjugated at the 5′ terminal end of the sense strand to an αvβ6 integrin targeting ligand having the modified sequences as set forth in the duplex structures herein. (See Tables 3, 4, 5, 6, 7A, 7B, 8, 9, 10, and 11 for specific modifications and structure information related to the TSLP RNAi agents, including Tri-SM6.1-αvβ6).

[0454] Five (5) mice were tested (n=5) for each group. Serum samples and lower right lobes were collected for human TSLP protein measurement by Meso Scale Discovery (MSD) Assay. Left lobe and all remaining right lobes were collected for TSLP mRNA expression measurement by qPCR, using eGFP as endogenous control gene, and normalized to Group 1. Data from the experiment are shown in the following Table 58:

TABLE 58
Average Relative TSLP Normalized to Control in AAV-hTSLP Mice from Example 25.

| | Average Relative hTSLP | Low | High |
|---|---|---|---|
| Group ID | mRNA Expression | (error) | (error) |
| Group 1. (AAV IT Days −17, −14) (Saline IT Days 1, 3) | 1.000 | 0.130 | 0.150 |
| Group 2. (AAV IT Days −17, −14) (0.75 mg/kg AC003374 IT Days 1, 3) | 0.351 | 0.042 | 0.047 |
| Group 3. (AAV IT Days −17, −14) (1.5 mg/kg AC003374 IT Days 1, 3) | 0.385 | 0.038 | 0.042 |
| Group 4. (AAV IT Days −17, −14) (3.0 mg/kg AC003374 IT Days 1, 3) | 0.340 | 0.068 | 0.086 |
| Group 5. (AAV IT Days −17, −14) (0.75 mg/kg AC004361 IT Days 1, 3) | 0.412 | 0.084 | 0.106 |
| Group 6. (AAV IT Days −17, −14) (1.5 mg/kg AC004361 IT Days 1, 3) | 0.397 | 0.072 | 0.088 |
| Group 7. (AAV IT Days −17, −14) (3.0 mg/kg AC004361 IT Days 1, 3) | 0.300 | 0.048 | 0.058 |
| Group 8. (AAV IT Days −17, −14) (1.5 mg/kg AC005945 IT Days 1, 3) | 0.397 | 0.051 | 0.058 |

[0455] As shown in Table 58, above, each of the TSLP RNAi agents tested (Groups 2-8) showed reductions in hTSLP expression compared to control (Group 1). Dose response was also observed for AC004361.

[0456] Further, hTSLP protein expression was measured for each of the dosing groups by MSD assay from the lower right lobe of the mouse lung tissues collected, and the data from certain of the samples are shown in FIGS. 11A and 11B. As shown in FIG. 11A, AC003374 achieved ˜89% reduction at 2×3.0 mg/kg dose, and AC004361 achieved ˜94% reduction at 2×3.0 mg/kg dose, of human TSLP protein in AAV transduced mouse lungs. Dose response was observed in AC004361 in mouse lungs. As shown in FIG. 11B, AC003374 achieved ˜90% reduction at 2×3.0 mg/kg dose, and AC004361 achieved ˜86% reduction at 2×3.0 mg/kg dose, of human TSLP protein in AAV transduced mouse serum. Dose response was observed in both AC003374 and AC004361 in mouse serum.

### Example 26. TSLP RNAi Agents in AAV9-CAG-hTSLP AAV Mouse Model

[0457] To evaluate certain TSLP RNAi agents, the same AAV9-CAG-hTSLP (Adeno-associated virus) mouse model as discussed in Example 4 was used.

[0458] The human TSLP mRNA expression was measured in the mice lung tissues by qPCR.

[0459] At Day −17 and Day −14, each mouse (female C57Bl/6) was given an intratracheal (IT) administration of 50 μL AAV solutions containing 2e10 GC (genome copy) of AAV9-CAG-eGFP and 2e10 GC of AAV9-CAG-hTSLP in PBS. At Day 1 and Day 3, each mouse was given intratracheal administration of 50 μL (at 0.75, 1.5, or 3.0 mg/kg) of TSLP RNAi agents formulated in isotonic saline, or vehicle control (isotonic saline with no RNAi agent), according to the following Table 59. The mice were humanely sacrificed and harvested on Day 15.

[0460] RNAi agent AC005329, a “RISC-blocked” RNAi agent, includes chemical modifications designed to prevent the loading of the antisense strand into RISC, thus serving as a negative control.

TABLE 59
Dosing Groups of Example 26.

| | | RNAi Agent | | # |
|---|---|---|---|---|
| | AAV dose | and Dose | | Animals |
| Group | (Day −17, −14) | (Day 1, 3) | Dosing Regimen | (n=) |
| 1 | 2e10 GC of AAV9-CAG-eGFP and | Saline | IT doses of AAV on Day −17, −14; | n = 5 |
| | 2e10 GC of AAV9-CAG-hTSLP | | IT doses of saline on Days 1, 3 | |
| 2 | 2e10 GC of AAV9-CAG-eGFP and | 0.75 mg/kg AC003374 | IT doses of AAV on Day −17, −14; | n = 5 |
| | 2e10 GC of AAV9-CAG-hTSLP | | IT doses of RNAi agent on Days 1, 3 | |
| 3 | 2e10 GC of AAV9-CAG-eGFP and | 1.5 mg/kg AC003374 | IT doses of AAV on Day −17, −14; | n = 5 |
| | 2e10 GC of AAV9-CAG-hTSLP | | IT doses of RNAi agent on Days 1, 3 | |
| 4 | 2e10 GC of AAV9-CAG-eGFP and | 3.0 mg/kg AC003374 | IT doses of AAV on Day −17, −14; | n = 5 |
| | 2e10 GC of AAV9-CAG-hTSLP | | IT doses of RNAi agent on Days 1, 3 | |
| 5 | 2e10 GC of AAV9-CAG-eGFP and | 0.75 mg/kg AC004361 | IT doses of AAV on Day −17, −14; | n = 5 |
| | 2e10 GC of AAV9-CAG-hTSLP | | IT doses of RNAi agent on Days 1, 3 | |
| 6 | 2e10 GC of AAV9-CAG-eGFP and | 1.5 mg/kg AC004361 | IT doses of AAV on Day −17, −14; | n = 5 |
| | 2e10 GC of AAV9-CAG-hTSLP | | IT doses of RNAi agent on Days 1, 3 | |
| 7 | 2e10 GC of AAV9-CAG-eGFP and | 3.0 mg/kg AC004361 | IT doses of AAV on Day −17, −14; | n = 5 |
| | 2e10 GC of AAV9-CAG-hTSLP | | IT doses of RNAi agent on Days 1, 3 | |
| 8 | 2e10 GC of AAV9-CAG-eGFP and | 3.0 mg/kg AC005329 | IT doses of AAV on Day −17, −14; | n = 5 |
| | 2e10 GC of AAV9-CAG-hTSLP | | IT doses of RNAi agent on Days 1, 3 | |

[0461] Each of the TSLP RNAi agents included modified nucleotides that were conjugated at the 5′ terminal end of the sense strand to an αvβ6 integrin targeting ligand having the modified sequences as set forth in the duplex structures herein. (See Tables 3, 4, 5, 6, 7A, 7B, 8, 9, 10, and 11 for specific modifications and structure information related to the TSLP RNAi agents, including Tri-SM6.1-αvβ6).

[0462] Five (5) mice were tested (n=5) for each group. Serum samples and lower right lobes were collected for human TSLP protein measurement by Meso Scale Discovery (MSD) Assay. Left lobe and all remaining right lobes were collected for TSLP mRNA expression measurement by qPCR, using eGFP as endogenous control gene, and normalized to Group 1. Data from the experiment are shown in the following Table 60.

TABLE 60
Average Relative TSLP Normalized to Control in AAV-hTSLP Mice from Example 26.

| | Average Relative hTSLP | Low | High |
|---|---|---|---|
| Group ID | mRNA Expression | (error) | (error) |
| Group 1. (AAV IT Days −17, −14) (Saline IT Days 1, 3) | 1.000 | 0.224 | 0.288 |
| Group 2. (AAV IT Days −17, −14) (0.75 mg/kg AC003374 IT Days 1, 3) | 0.602 | 0.168 | 0.233 |
| Group 3. (AAV IT Days −17, −14) (1.5 mg/kg AC003374 IT Days 1, 3) | 0.521 | 0.092 | 0.112 |
| Group 4. (AAV IT Days −17, −14) (3.0 mg/kg AC003374 IT Days 1, 3) | 0.340 | 0.073 | 0.094 |
| Group 5. (AAV IT Days −17, −14) (0.75 mg/kg AC004361 IT Days 1, 3) | 0.440 | 0.046 | 0.051 |
| Group 6. (AAV IT Days −17, −14) (1.5 mg/kg AC004361 IT Days 1, 3) | 0.350 | 0.055 | 0.065 |
| Group 7. (AAV IT Days −17, −14) (3.0 mg/kg AC004361 IT Days 1, 3) | 0.366 | 0.117 | 0.171 |
| Group 8. (AAV IT Days −17, −14) (3.0 mg/kg AC005329 IT Days 1, 3) | 0.877 | 0.178 | 0.223 |

[0463] As shown in Table 60, above, RNAi agents of Groups 2-7 tested showed reductions in hTSLP expression compared to control (Group 1). Dose response was also observed for AC003374.

[0464] Further, hTSLP protein expression was measured for each of the dosing groups by MSD assay from the lower right lobe of the mouse lung tissues collected, and the data from certain of the samples are shown in FIGS. 12A and 12B. As shown in FIG. 12A, AC003374 achieved ˜94% reduction at 2×3.0 mg/kg dose, and AC004361 achieved ˜92% reduction at 2×3.0 mg/kg dose, of human TSLP protein in AAV transduced mouse lungs. Dose response was also observed in AC003374 in mouse lungs. As shown in FIG. 12B, AC003374 achieved ˜91% reduction at 2×1.5 mg/kg dose, and AC004361 achieved ˜92% reduction at 2×1.5 mg/kg dose, of human TSLP protein in AAV transduced mouse serum.

### Example 27. In Vivo Administration of TSLP RNAi Agents in B-hTSLP/hTSLPR Humanized TSLP Knock-In Mice

[0465] To evaluate certain TSLP RNAi agents, a B-hTSLP/hTSLPR mouse model was used. C57BL/6-Tslp^{tm1(TSLP)}Crlf2^{tm2(CRLF2)}/Bcgen (strain name), also referred to as B-hTSLP/hTSLPR mice (common name), were purchased and received from Biocytogen (Catalog #121269). The background mouse was of C57BL/6 strain. The exons 1-5 of the mouse TSLP gene that encode full-length protein were replaced by human TSLP exons 1-4, containing nucleobases 179-658 of human TSLP, in the B-hTSLP/hTSLPR mice. The extracellular and transmembrane region of human thymic stromal lymphopoietin receptor (TSLPR) gene and cytoplasmic region of mouse TSLPR gene were constructed into a chimeric CDS vector and inserted into the mouse exon 2. The mice express chimeric TSLP and TSLPR proteins, while the mouse TSLP or TSLPR will no longer express.

[0466] On Day 1 and Day 3, five (n=5) male B-hTSLP/hTSLPR mice were dosed, via intratracheal (IT) administration, with either saline (as vehicle control) or TSLP RNAi agents formulated in isotonic saline (at 5.0 mg/kg), at 50 μL dose volume. Dosing was in accordance with the following Table 61.

[0467] RNAi agent AC005329, a “RISC-blocked” RNAi agent, includes chemical modifications designed to prevent the loading of the antisense strand into RISC, thus serving as a negative control.

TABLE 61
Dosing Groups of Example 27.

| | | | Sacrifice | # Animals |
|---|---|---|---|---|
| Group | RNAi Agent | Dosing Regimen | Day | (n =) |
| 1 | Saline | Day 1 and 3: IT Administration | Day 15 | n = 5 |
| 2 | AC003374 5.0 mg/kg | Day 1 and 3: IT Administration | Day 15 | n = 5 |
| 3 | AC004361 5.0 mg/kg | Day 1 and 3: IT Administration | Day 15 | n = 5 |
| 4 | AC005329 5.0 mg/kg | Day 1 and 3: IT Administration | Day 15 | n = 5 |
| 5 | Saline | Day 1 and 3: IT Administration | Day 29 | n = 5 |
| 6 | AC003374 5.0 mg/kg | Day 1 and 3: IT Administration | Day 29 | n = 5 |
| 7 | AC004361 5.0 mg/kg | Day 1 and 3: IT Administration | Day 29 | n = 5 |
| 8 | Saline | Day 1 and 3: IT Administration | Day 43 | n = 5 |
| 9 | AC003374 5.0 mg/kg | Day 1 and 3: IT Administration | Day 43 | n = 5 |
| 10 | AC004361 5.0 mg/kg | Day 1 and 3: IT Administration | Day 43 | n = 4 |

[0468] Five (5) mice were tested (n=5) for each group. Mice test animals were humanely sacrificed and harvested on Days 15, 29, or 43. Lungs were collected for TSLP mRNA expression measurement by qPCR, using mGAPDH as endogenous control gene. Groups 2-4 were normalized to Group 1, Groups 6-7 were normalized to Group 5, and Groups 9-10 were normalized to Group 8. Data from the experiment are shown in the following Table 62:

TABLE 62
Relative TSLP expression in mice test animals of Example 27.

hTSLP

| | Rel. | Error | Error |
|---|---|---|---|
| Group ID | Exp. | Low | High |
| 1. Saline, D 15 Sac | 1.000 | 0.057 | 0.060 |
| 2. AC003374 5.0 mg/kg, D 15 Sac | 0.503 | 0.056 | 0.063 |
| 3. AC004361 5.0 mg/kg, D 15 Sac | 0.529 | 0.056 | 0.063 |
| 4. AC005329 5.0 mg/kg, D 15 Sac | 0.972 | 0.074 | 0.080 |
| 5. Saline, D 29 Sac | 1.000 | 0.087 | 0.095 |
| 6. AC003374 5.0 mg/kg, D 29 Sac | 0.635 | 0.078 | 0.089 |
| 7. AC004361 5.0 mg/kg, D 29 Sac | 0.554 | 0.073 | 0.083 |
| 8. Saline, D 43 Sac | 1.000 | 0.113 | 0.128 |
| 9. AC003374 5.0 mg/kg, D 43 Sac | 0.475 | 0.095 | 0.119 |
| 10. AC004361 5.0 mg/kg, D 43 Sac | 0.637 | 0.097 | 0.114 |

[0469] TSLP RNAi agents silenced expression of human TSLP mRNA in lungs of knock-in mice for over 6 weeks. The RISC-blocked RNAi agent AC005329 (Group 4) showed inability to silence hTSLP expression. Groups 2, 3, 6, 7, 9, and 10 showed reduction in hTSLP in the mice test animals. More specifically, AC003374 showed hTSLP inhibition, ˜52% inhibition (0.475) at 5.0 mg/kg on Day 43. Groups 9 and 10 showed hTSLP inhibition out to at least Day 43.

### Example 28. In Vivo Administration of TSLP RNAi Agents in B-hTSLP/hTSLPR Humanized TSLP Knock-In Mice

[0470] To evaluate certain TSLP RNAi agents, a B-hTSLP/hTSLPR mouse model was used. C57BL/6-Tslp^{tm1/(TSLP)}Crlf2^{tm2(CRLF2)}/Bcgen (strain name), also referred to as B-hTSLP/hTSLPR mice (common name), were purchased and received from Biocytogen (Catalog #121269). The background mouse was of C57BL/6 strain. The exons 1-5 of the mouse TSLP gene that encode full-length protein were replaced by human TSLP exons 1-4, containing nucleobases 179-658 of human TSLP, in the B-hTSLP/hTSLPR mice. The extracellular and transmembrane region of human thymic stromal lymphopoietin receptor (TSLPR) gene and cytoplasmic region of mouse TSLPR gene were constructed into a chimeric CDS vector and inserted into the mouse exon 2. The mice express chimeric TSLP and TSLPR proteins, while the mouse TSLP and TSLPR will no longer express.

[0471] On Day 1 and Day 3, five (n=5) male B-hTSLP/hTSLPR mice were dosed, via intratracheal (IT) administration, with either saline (as vehicle control) or TSLP RNAi agents formulated in isotonic saline (at 1.0, 2.5, or 5.0 mg/kg), at 50 μL dose volume. Dosing was in accordance with the following Table 63.

[0472] RNAi agents AC005329 and AC006020, “RISC-blocked” RNAi agents, include chemical modifications designed to prevent the loading of the antisense strand into RISC, thus serving as a negative control.

TABLE 63
Dosing Groups of Example 28.

| | | | Sacrifice | # Animals |
|---|---|---|---|---|
| Group | RNAi Agent | Dosing Regimen | Day | (n=) |
| 1 | Saline | Day 1 and 3: IT Administration | Day 15 | n = 5 |
| 2 | AC003374 5.0 mg/kg | Day 1 and 3: IT Administration | Day 15 | n = 5 |
| 3 | AC003374 2.5 mg/kg | Day 1 and 3: IT Administration | Day 15 | n = 5 |
| 4 | AC003374 1.0 mg/kg | Day 1 and 3: IT Administration | Day 15 | n = 5 |
| 5 | AC004361 5.0 mg/kg | Day 1 and 3: IT Administration | Day 15 | n = 5 |
| 6 | AC004361 2.5 mg/kg | Day 1 and 3: IT Administration | Day 15 | n = 5 |
| 7 | AC004361 1.0 mg/kg | Day 1 and 3: IT Administration | Day 15 | n = 5 |
| 8 | AC005329 5.0 mg/kg | Day 1 and 3: IT Administration | Day 15 | n = 5 |
| 9 | AC005329 2.5 mg/kg | Day 1 and 3: IT Administration | Day 15 | n = 5 |
| 10 | AC005329 1.0 mg/kg | Day 1 and 3: IT Administration | Day 15 | n = 5 |
| 11 | AC006020 5.0 mg/kg | Day 1 and 3: IT Administration | Day 15 | n = 4 |

[0473] Five (5) mice were tested (n=5) for each group. Mice test animals were humanely sacrificed and harvested on Day 15. Lungs were collected for TSLP mRNA expression measurement by qPCR, using mB2M as endogenous control gene. Groups 2-11 were normalized to Group 1. Data from the experiment are shown in the following Table 64:

TABLE 64
Relative TSLP expression in mice test animals of Example 28.

| | hTSLP | | |
|---|---|---|---|
| | Rel. | Error | Error |
| Group ID | Exp. | Low | High |
| 1. Saline | 1.000 | 0.182 | 0.222 |
| 2. AC003374 5.0 mg/kg | 0.506 | 0.136 | 0.186 |
| 3. AC003374 2.5 mg/kg | 0.662 | 0.132 | 0.165 |
| 4. AC003374 1.0 mg/kg | 0.733 | 0.193 | 0.262 |
| 5. AC004361 5.0 mg/kg | 0.570 | 0.104 | 0.127 |
| 6. AC004361 2.5 mg/kg | 0.723 | 0.120 | 0.144 |
| 7. AC004361 1.0 mg/kg | 0.642 | 0.104 | 0.124 |
| 8. AC005329 5.0 mg/kg | 0.962 | 0.141 | 0.165 |
| 9. AC005329 2.5 mg/kg | 1.116 | 0.138 | 0.157 |
| 10. AC005329 1.0 mg/kg | 1.041 | 0.199 | 0.246 |
| 11. AC006020 5.0 mg/kg | 0.862 | 0.151 | 0.183 |

[0474] Groups 2-7 showed reduction in hTSLP in the mice test animals. Groups 8-11 showed negligible hTSLP inhibition. More specifically, AC003374 showed hTSLP inhibition, ˜49% inhibition (0.506) at 5.0 mg/kg on Day 15. Dose response was observed for mice treated with AC003374.

### OTHER EMBODIMENTS

[0475] It is to be understood that while the invention has been described in conjunction with the detailed description thereof, the foregoing description is intended to illustrate and not limit the scope of the invention, which is defined by the scope of the appended claims. Other aspects, advantages, and modifications are within the scope of the following claims.

1. An RNAi agent for inhibiting expression of a thymic stromal lymphopoietin gene, comprising:
an antisense strand comprising at least 17 contiguous nucleotides differing by 0 or 1 nucleotides from any one of the sequences provided in Table 2 or Table 3; and
a sense strand comprising a nucleotide sequence that is at least partially complementary to the antisense strand.

2. The RNAi agent of claim 1, wherein the antisense strand comprises nucleotides 2-18 of any one of the sequences provided in Table 2 or Table 3.

3. The RNAi agent of claim 1 or claim 2, wherein the sense strand comprises a nucleotide sequence of at least 17 contiguous nucleotides differing by 0 or 1 nucleotides from any one of the sequences provided in Table 2 or Table 4, and wherein the sense strand has a region of at least 85% complementarity over the 17 contiguous nucleotides to the antisense strand.

4. The RNAi agent of any one of claims 1-3, wherein at least one nucleotide of the TSLP RNAi agent is a modified nucleotide or includes a modified internucleoside linkage.

5. The RNAi agent of any one of claims 1-4, wherein all or substantially all of the nucleotides are modified nucleotides.

6. The RNAi agent of any one of claims 4-5, wherein the modified nucleotide is selected from the group consisting of: 2′-O-methyl nucleotide, 2′-fluoro nucleotide, 2′-deoxy nucleotide, 2′,3′-seco nucleotide mimic, locked nucleotide, 2′-F-arabino nucleotide, 2′-methoxyethyl nucleotide, abasic nucleotide, ribitol, inverted nucleotide, inverted 2′-O-methyl nucleotide, inverted 2′-deoxy nucleotide, 2′-amino-modified nucleotide, 2′-alkyl-modified nucleotide, morpholino nucleotide, vinyl phosphonate-containing nucleotide, cyclopropyl phosphonate-containing nucleotide, and 3′-O-methyl nucleotide.

7. The RNAi agent of claim 5, wherein all or substantially all of the nucleotides are modified with 2′-O-methyl nucleotides, 2′-fluoro nucleotides, or combinations thereof.

8. The RNAi agent of any one of claims 1-7, wherein the antisense strand comprises the nucleotide sequence of any one of the modified sequences provided in Table 3.

9. The RNAi agent of any one of claims 1-8, wherein the sense strand comprises the nucleotide sequence of any one of the modified sequences provided in Table 4.

10. The RNAi agent of claim 1, wherein the antisense strand comprises the nucleotide sequence of any one of the modified sequences provided in Table 3 and the sense strand comprises the nucleotide sequence of any one of the modified sequences provided in Table 4.

11. The RNAi agent of any one of claims 1-10, wherein the sense strand is between 18 and 30 nucleotides in length, and the antisense strand is between 18 and 30 nucleotides in length.

12. The RNAi agent of claim 11, wherein the sense strand and the antisense strand are each between 18 and 27 nucleotides in length.

13. The RNAi agent of claim 12, wherein the sense strand and the antisense strand are each between 18 and 24 nucleotides in length.

14. The RNAi agent of claim 13, wherein the sense strand and the antisense strand are each 21 nucleotides in length.

15. The RNAi agent of claim 14, wherein the RNAi agent has two blunt ends.

16. The RNAi agent of any one of claims 1-15, wherein the sense strand comprises one or two terminal caps.

17. The RNAi agent of any one of claims 1-16, wherein the sense strand comprises one or two inverted abasic residues.

18. The RNAi agent of claim 1, wherein the RNAi agent is comprised of a sense strand and an antisense strand that form a duplex having the structure of any one of the duplexes in Table 7A, Table 7B, Table 8, Table 9, or Table 10.

19. The RNAi agent of claim 18, wherein all or substantially all of the nucleotides are modified nucleotides.

20. The RNAi agent of claim 1, comprising an antisense strand that consists of, consists essentially of, or comprises a nucleotide sequence that differs by 0 or 1 nucleotides from one of the following nucleotide sequences (5′→3′):
(SEQ ID NO: 836)
AGACAUUUAUUGGUUGUGACC;
(SEQ ID NO: 853)
AGACGUUUAUUGGUUGUGACC;
(SEQ ID NO: 837)
UGACAUUUAUUGGUUGUGACC;
(SEQ ID NO: 856)
UGACGUUUAUUGGUUGUGACC;
(SEQ ID NO: 196)
AGACAUUUAUUGGUUGUGA;
(SEQ ID NO: 197)
UGACAUUUAUUGGUUGUGA;
(SEQ ID NO: 137)
UUAGCAUUUAUCUGAGUUU;
(SEQ ID NO: 139)
UUAGCAUUUAUCUGAGUUC;
(SEQ ID NO: 192)
UACAUUUAUUGGUUGUGAC;
(SEQ ID NO: 830)
AGACAUUUAUUGGUUGUGACU;
(SEQ ID NO: 825)
UUAGCAUUUAUCUGAGUUUCC;
or
(SEQ ID NO: 826)
UACAUUUAUUGGUUGUGACUU.

21. The RNAi agent of claim 20, wherein the sense strand consists of, consists essentially of, or comprises a nucleotide sequence that differs by 0 or 1 nucleotides from one of the following nucleotide sequences (5′→3′):
(SEQ ID NO: 872)
GGUCACAACCAAUAAAUGUCU;
(SEQ ID NO: 873)
GGUCACAACCAAUAAAUGUCA;
(SEQ ID NO: 461)
UCACAACCAAUAAAUGUCU;
(SEQ ID NO: 462)
UCACAACCAAUAAAUGUCA;
(SEQ ID NO: 402)
AAACUCAGAUAAAUGCUAA;
(SEQ ID NO: 871)
G(A^{2N})ACUCAGAUAAAUGCUAA;
(SEQ ID NO: 457)
GUCACAACCAAUAAAUGUA
(SEQ ID NO: 864)
AGUCACAACCAAUAAAUGUCU;
(SEQ ID NO: 866)
GGAAACUCAGAUAAAUGCUAA;
or
(SEQ ID NO: 863)
(A^{2N})AGUCACAACCAAUAAAUGUA,
wherein (A^{2N}) represents a 2-aminoadenosine nucleotide.

22. The RNAi agent of claim 20 or 21, wherein all or substantially all of the nucleotides are modified nucleotides.

23. The RNAi agent of claim 1, comprising an antisense strand that comprises, consists of, or consists essentially of a modified nucleotide sequence that differs by 0 or 1 nucleotides from one of the following nucleotide sequences (5′→3′):
(SEQ ID NO: 649)
cPrpasGfsacauuuaUfuGfgUfuGfugacsc
(SEQ ID NO: 609)
cPrpasGfsaCfaUfuUfaUfuGfgUfuGfuGfaCfsu;
(SEQ ID NO: 611)
cPrpasGfsacauuuaUfuGfgUfuGfugacsu;
(SEQ ID NO: 681)
cPrpasGfsacguuuaUfuGfgUfuGfugacsc;
(SEQ ID NO: 612)
cPrpasGfsacauuuAfuuGfgUfuGfugacsu;
(SEQ ID NO: 603)
cPrpusUfsagcauuUfauCfuGfaGfuuucsc;
(SEQ ID NO: 606)
cPrpusUfsagcauUfuauCfuGfaGfuuucsc;
or
(SEQ ID NO: 594)
cPrpusAfscsAfuUfuAfuUfgGfuUfgUfgAfcUfsu;
wherein a represents 2′-O-methyl adenosine, c represents 2′-O-methyl cytidine, g represents 2′-O-methyl guanosine, and u represents 2′-O-methyl uridine; Af, represents 2′-fluoro adenosine, Cf represents 2′-fluoro cytidine, Gf represents 2′-fluoro guanosine, and Uf represents 2′-fluoro uridine; cPrpa represents a 5′-cyclopropyl phosphonate-2′-O-methyl adenosine; cPrpu represents a 5′-cyclopropyl phosphonate-2′-O-methyl uridine; s represents a phosphorothioate linkage; and wherein all or substantially all of the nucleotides on the sense strand are modified nucleotides.

24. The RNAi agent of claim 1, wherein the sense strand comprises, consists of, or consists essentially of a modified nucleotide sequence that differs by 0 or 1 nucleotides from one of the following nucleotide sequences (5′→3′):
(SEQ ID NO: 714)
gsgucacaaCfCfAfauaaaugucu;
(SEQ ID NO: 702)
asgucacaaCfCfAfauaaaugucu;
(SEQ ID NO: 704)
gsgaaacucAfGfAfuaaaugcuaa;
(SEQ ID NO: 701)
a_2NsagucacaAfCfCfaauaaaugua;
wherein a represents 2′-O-methyl adenosine, c represents 2′-O-methyl cytidine, g represents 2′-O-methyl guanosine, and u represents 2′-O-methyl uridine; Af, represents 2′-fluoro adenosine, Cf represents 2′-fluoro cytidine, Gf represents 2′-fluoro guanosine, and Uf represents 2′-fluoro uridine; a 2N represents 2′-O-methyl-2-aminoadenosine; s represents a phosphorothioate linkage; and wherein all or substantially all of the nucleotides on the antisense strand are modified nucleotides.

25. The RNAi agent of any one of claims 20-24, wherein the sense strand further includes inverted abasic residues at the 3′ terminal end of the nucleotide sequence, at the 5′ end of the nucleotide sequence, or at both.

26. The RNAi agent of any one of claims 1-25, wherein the RNAi agent is linked to a targeting ligand.

27. The RNAi agent of claim 26, wherein the targeting ligand has affinity for a cell receptor expressed on an epithelial cell.

28. The RNAi agent of claim 27, wherein the targeting ligand comprises an integrin targeting ligand.

29. The RNAi agent of claim 28, wherein the integrin targeting ligand is an αvβ6 integrin targeting ligand.

30. The RNAi agent of claim 29, wherein the targeting ligand comprises the structure: [chemical structure]
or a pharmaceutically acceptable salt thereof, or [chemical structure]
or a pharmaceutically acceptable salt thereof,
wherein [symbol] indicates the point of connection to the RNAi agent.

31. The RNAi agent of any one of claims 26-29, wherein the targeting ligand has a structure selected from the group consisting of: [chemical structure] [chemical structure] [chemical structure] [chemical structure] [chemical structure] [chemical structure] [chemical structure] [chemical structure] [chemical structure]
wherein [symbol] indicates the point of connection to the RNAi agent.

32. The RNAi agent of claim 31, wherein RNAi agent is conjugated to a targeting ligand having the following structure:

[chemical structure]

33. The RNAi agent of any one of claims 26-32, wherein the targeting ligand is conjugated to the sense strand.

34. The RNAi agent of claim 33, wherein the targeting ligand is conjugated to the 5′ terminal end of the sense strand.

35. The RNAi agent of any one of claims 1-34, wherein the RNAi agent is a pharmaceutically acceptable salt.

36. The RNAi agent of any one of claim 35, wherein the RNAi agent is a sodium salt.

37. A composition comprising the RNAi agent of any one of claims 1-36, wherein the composition further comprises a pharmaceutically acceptable excipient.

38. The composition of claim 37, further comprising a second RNAi agent capable of inhibiting the expression of thymic stromal lymphopoietin gene expression.

39. The composition of any one of claims 37-38, further comprising one or more additional therapeutics.

40. The composition of any one of claims 37-39, wherein the composition is formulated for administration by inhalation.

41. The composition of claim 40, wherein the composition is delivered by a metered-dose inhaler, jet nebulizer, vibrating mesh nebulizer, or soft mist inhaler.

42. The composition of any of claims 37-41, wherein the RNAi agent is a sodium salt.

43. The composition of any of claims 37-42, wherein the pharmaceutically acceptable excipient is water for injection.

44. The composition of any of claims 37-42, wherein the pharmaceutically acceptable excipient is a buffered saline solution.

45. A method for inhibiting expression of a TSLP gene in a cell, the method comprising introducing into a cell an effective amount of an RNAi agent of any one of claims 1-35 or the composition of any one of claims 37-44.

46. The method of claim 45, wherein the cell is within a subject.

47. The method of claim 46, wherein the subject is a human subject.

48. The method of any one of claims 45-47, wherein following the administration of the RNAi agent the thymic stromal lymphopoietin gene expression is inhibited by at least about 30%.

49. A method of treating one or more symptoms or diseases associated with enhanced or elevated TSLP cytokine activity levels, the method comprising administering to a human subject in need thereof a therapeutically effective amount of the composition of any one of claims 37-44.

50. The method of claim 49, wherein the disease is asthma including but not limited to allergic asthma, chronic obstructive pulmonary disease including but not limited to chronic bronchitis and emphysema, pulmonary inflammatory disorders, interstitial lung diseases (ILD), cystic fibrosis, various other types of fibrosis, infectious diseases (for example, SARS-COV-2), acute lung injury (for example, acute respiratory distress syndrome (ARDS)), pulmonary hypertension, various pulmonary cancers, chronic rhinosinutis either with or without nasal polyps, autoimmune disorders including but not limited to systemic sclerosis (SSc), and multiple inflammatory diseases including but not limited to atopic dermatitis, chronic spontaneous urticaria, and eosinophilic esophagitis.

51. The method of claim 50, wherein the disease is allergic asthma.

52. The method of any one of claims 45-51, wherein the RNAi agent is administered at a deposited dose of about 0.01 mg/kg to about 5.0 mg/kg of body weight of the subject.

53. The method of any one of claims 45-52, wherein the RNAi agent is administered at a deposited dose of about 0.03 mg/kg to about 2.0 mg/kg of body weight of the subject.

54. The method of any of claims 45-53, wherein the RNAi agent is administered in two or more doses.

55. Use of the RNAi agent of any one of claims 1-36, for the treatment of a disease, disorder, or symptom that is mediated at least in part by TSLP cytokine activity and/or TSLP gene expression.

56. Use of the composition according to any one of claims 37-44, for the treatment of a disease, disorder, or symptom that is mediated at least in part by thymic stromal lymphopoietin cytokine activity and/or thymic stromal lymphopoietin gene expression.

57. Use of the composition according to any one of claims 37-44, for the manufacture of a medicament for treatment of a disease, disorder, or symptom that is mediated at least in part by thymic stromal lymphopoietin cytokine and/or thymic stromal lymphopoietin gene expression.

58. The use of any one of claims 55-57, wherein the disease is pulmonary inflammation.

59. A method of making an RNAi agent of any one of claims 1-36, comprising annealing a sense strand and an antisense strand to form a double-stranded ribonucleic acid molecule.

60. The method of claim 59, wherein the sense strand comprises a targeting ligand.

61. The method of claim 60, comprising conjugating a targeting ligand to the sense strand.

The application's sequence listing, which the Patent Office published only in electronic form, follows.

SEQUENCE LISTING (906 sequences)

SEQ ID NO: 1 - RNA, 2610 nt, Homo sapiens
  source 1..2610: mol_type = mRNA
atcagggagactccaacttaaggcaacagcatgggtgaataagggcttcctgtggactggcaatgagaggcaaaacctggtgcttgagcactggcccctaaggcaggccttacagatctcttacactcgtggtgggaagagtttagtgtgaaactggggtggaattgggtgtccacgtatgttcccttttgccttactatatgttctgtcagtttctttcaggaaaatcttcatcttacaacttgtagggctggtgttaacttacgacttcactaactgtgactttgagaagattaaagcagcctatctcagtactatttctaaagacctgattacatatatgagtgggaccaaaagtaccgagttcaacaacaccgtctcttgtagcaatcggccacattgccttactgaaatccagagcctaaccttcaatcccaccgccggctgcgcgtcgctcgccaaagaaatgttcgccatgaaaactaaggctgccttagctatctggtgcccaggctattcggaaactcagataaatgctactcaggcaatgaagaagaggagaaaaaggaaagtcacaaccaataaatgtctggaacaagtgtcacaattacaaggattgtggcgtcgcttcaatcgacctttactgaaacaacagtaaaccatctttattatggtcatatttcacagcaccaaaataaatcatctttattaagtagatgaaacattaactctaactgtgacaaagaagaccacaaatagttatcttttaattacagaagagtttcttaacttacttttgtaagtttttattgtgtaagtttataatgcaggggaagtactactcctcaaatgttgagggaagcttccataacattgatgactggcttcatggcagtaattctcggctgtagttgcataagcattgctcaagaggaaaatccaaaagtgcagcaggagaactcttttccctgaaaaaggaaaaatattgaactcaatgatagcacctaaacttacatttaaaagacagacattccttctacatgtaatgacacttcttgtgttaaactaaaaatttacaagagaagaaagtgaaagcaaatggggtttcacaaatagttgtaaatatagtgaagcaatttgaaataattttcaagcaaagtattgtgaaagtattctaagccaagttttaaatattatctaacagacaagagtggtatatacaagtagatcctgagaagtacctttgttacagctactataaatatacatataaattatagaatctactttaatttattttgtgaacacttttgaaaatgtacatgttcctttgtaattgacactatatatttcttaataaaataattctcaaatttgtttcttatgaatcatctctcaaatctagttagacaatttgcacacatacttttctaagggacattatcttccttcaggtttttacctccactcatccttagagcccactgactgctcccctttatacctgttggccctgcctataggagagaatatttggagataggcagcttcaggatgcattgcaatcatccttttcttaaattatgtcactagtcttttattttttcccctcttgaactttcctcacacctggaagaaacaaagtaggaaaaagtgaacaggggatgtcaaatcgattcttgaattcccgctgcaagctagagccgcaggcaccctctcactcaatttccactcagaaccctataaacaccagtgggaagggcaacccactgcacgtgggaatgcactgatttttcctaggagtagacatgttcctctaattactccctgagggttagttggggctaaaccatgacagaagtggggaagttcaatgtccttaaatccatcttacttgccaacaggtaagaggaagcttacattacatgtccagtccacatttaaagagcacttactgtggaacaagccttcagccaaacaatggggatagaaaagtaggtaagactcagcctttgtccagagaagctcagggtatagctgaataggcagtttcttttgtcctgaggaaaatcaggacatgcctgctttctaaaaatcttcctctgaagacctgacccaagctcttaaatgctattgtaagagaaatttctttgtctattaactccattttagtagggattcactgactagattttactgaactatgaaaataaatacacataatttttcacaaaattttgggcccaattcccctaaaagaattgaggattagggagaaaggagacaactcaaagtcatcccattaagtgcagtttctttgaatcttctgctttatctttaaaaatttgtataatttatatattttattctatgtgttccatagatatcttaatgtaaaattagtcatttaaattacactgtcaattaaaagtaatgggcaagagattgcatcatactaatttagtaagaacgttcccaaatgttgtaacaatgtggatcatacatctctggttttttaaatgtattgaggctttcttggtggactagtatagtatacggtcagttatgtcaatgtttcatggtcaataaaaaggaagttgcaaattgtga

SEQ ID NO: 2 - RNA, 19 nt, synthetic construct
  source 1..19: mol_type = other RNA
ttgccttactgaaatccag

SEQ ID NO: 3 - RNA, 19 nt, synthetic construct
  source 1..19: mol_type = other RNA
ctgaaatccagagcctaac

SEQ ID NO: 4 - RNA, 19 nt, synthetic construct
  source 1..19: mol_type = other RNA
gaaatccagagcctaacct

SEQ ID NO: 5 - RNA, 19 nt, synthetic construct
  source 1..19: mol_type = other RNA
aatccagagcctaaccttc

SEQ ID NO: 6 - RNA, 19 nt, synthetic construct
  source 1..19: mol_type = other RNA
ccagagcctaaccttcaat

SEQ ID NO: 7 - RNA, 19 nt, synthetic construct
  source 1..19: mol_type = other RNA
cagagcctaaccttcaatc

SEQ ID NO: 8 - RNA, 19 nt, synthetic construct
  source 1..19: mol_type = other RNA
agagcctaaccttcaatcc

SEQ ID NO: 9 - RNA, 19 nt, synthetic construct
  source 1..19: mol_type = other RNA
gagcctaaccttcaatccc

SEQ ID NO: 10 - RNA, 19 nt, synthetic construct
  source 1..19: mol_type = other RNA
agcctaaccttcaatccca

SEQ ID NO: 11 - RNA, 19 nt, synthetic construct
  source 1..19: mol_type = other RNA
ttcgccatgaaaactaagg

SEQ ID NO: 12 - RNA, 19 nt, synthetic construct
  source 1..19: mol_type = other RNA
ggctgccttagctatctgg

SEQ ID NO: 13 - RNA, 19 nt, synthetic construct
  source 1..19: mol_type = other RNA
aggctattcggaaactcag

SEQ ID NO: 14 - RNA, 19 nt, synthetic construct
  source 1..19: mol_type = other RNA
tattcggaaactcagataa

SEQ ID NO: 15 - RNA, 19 nt, synthetic construct
  source 1..19: mol_type = other RNA
attcggaaactcagataaa

SEQ ID NO: 16 - RNA, 19 nt, synthetic construct
  source 1..19: mol_type = other RNA
ttcggaaactcagataaat

SEQ ID NO: 17 - RNA, 19 nt, synthetic construct
  source 1..19: mol_type = other RNA
tcggaaactcagataaatg

SEQ ID NO: 18 - RNA, 19 nt, synthetic construct
  source 1..19: mol_type = other RNA
aaactcagataaatgctaa

SEQ ID NO: 19 - RNA, 19 nt, synthetic construct
  source 1..19: mol_type = other RNA
gctactcaggcaatgaaga

SEQ ID NO: 20 - RNA, 19 nt, synthetic construct
  source 1..19: mol_type = other RNA
ctactcaggcaatgaagaa

SEQ ID NO: 21 - DNA, 19 bp, synthetic construct
  source 1..19: mol_type = other DNA
gaagaggagaaaaaggaaa

SEQ ID NO: 22 - RNA, 19 nt, synthetic construct
  source 1..19: mol_type = other RNA
aggagaaaaaggaaagtca

SEQ ID NO: 23 - RNA, 19 nt, synthetic construct
  source 1..19: mol_type = other RNA
ggagaaaaaggaaagtcac

SEQ ID NO: 24 - RNA, 19 nt, synthetic construct
  source 1..19: mol_type = other RNA
aaaaaggaaagtcacaacc

SEQ ID NO: 25 - RNA, 19 nt, synthetic construct
  source 1..19: mol_type = other RNA
aaaggaaagtcacaaccaa

SEQ ID NO: 26 - RNA, 19 nt, synthetic construct
  source 1..19: mol_type = other RNA
aggaaagtcacaaccaata

SEQ ID NO: 27 - RNA, 19 nt, synthetic construct
  source 1..19: mol_type = other RNA
gaaagtcacaaccaataaa

SEQ ID NO: 28 - RNA, 19 nt, synthetic construct
  source 1..19: mol_type = other RNA
aaagtcacaaccaataaat

SEQ ID NO: 29 - RNA, 19 nt, synthetic construct
  source 1..19: mol_type = other RNA
aagtcacaaccaataaatg

SEQ ID NO: 30 - RNA, 19 nt, synthetic construct
  source 1..19: mol_type = other RNA
gtcacaaccaataaatgtc

SEQ ID NO: 31 - RNA, 19 nt, synthetic construct
  source 1..19: mol_type = other RNA
tcacaaccaataaatgtct

SEQ ID NO: 32 - RNA, 19 nt, synthetic construct
  source 1..19: mol_type = other RNA
aatgtctggaacaagtgtc

SEQ ID NO: 33 - RNA, 19 nt, synthetic construct
  source 1..19: mol_type = other RNA
tgtctggaacaagtgtcac

SEQ ID NO: 34 - RNA, 19 nt, synthetic construct
  source 1..19: mol_type = other RNA
tggaacaagtgtcacaatt

SEQ ID NO: 35 - RNA, 19 nt, synthetic construct
  source 1..19: mol_type = other RNA
ggaacaagtgtcacaatta

SEQ ID NO: 36 - RNA, 19 nt, synthetic construct
  source 1..19: mol_type = other RNA
gaacaagtgtcacaattac

SEQ ID NO: 37 - RNA, 19 nt, synthetic construct
  source 1..19: mol_type = other RNA
aacaagtgtcacaattaca

SEQ ID NO: 38 - RNA, 19 nt, synthetic construct
  source 1..19: mol_type = other RNA
cttcaatcgacctttactg

SEQ ID NO: 39 - RNA, 19 nt, synthetic construct
  source 1..19: mol_type = other RNA
agtaaaccatctttattat

SEQ ID NO: 40 - RNA, 19 nt, synthetic construct
  source 1..19: mol_type = other RNA
atatttcacagcaccaaaa

SEQ ID NO: 41 - RNA, 19 nt, synthetic construct
  source 1..19: mol_type = other RNA
aacattaactctaactgtg

SEQ ID NO: 42 - RNA, 19 nt, synthetic construct
  source 1..19: mol_type = other RNA
agaagagtttcttaactta

SEQ ID NO: 43 - RNA, 19 nt, synthetic construct
  source 1..19: mol_type = other RNA
aagagtttcttaacttact

SEQ ID NO: 44 - RNA, 19 nt, synthetic construct
  source 1..19: mol_type = other RNA
actactcctcaaatgttga

SEQ ID NO: 45 - RNA, 19 nt, synthetic construct
  source 1..19: mol_type = other RNA
tccataacattgatgactg

SEQ ID NO: 46 - RNA, 19 nt, synthetic construct
  source 1..19: mol_type = other RNA
attgatgactggcttcatg

SEQ ID NO: 47 - RNA, 19 nt, synthetic construct
  source 1..19: mol_type = other RNA
aatgatagcacctaaactt

SEQ ID NO: 48 - RNA, 19 nt, synthetic construct
  source 1..19: mol_type = other RNA
gacagacattccttctaca

SEQ ID NO: 49 - RNA, 19 nt, synthetic construct
  source 1..19: mol_type = other RNA
gacattccttctacatgta

SEQ ID NO: 50 - RNA, 19 nt, synthetic construct
  source 1..19: mol_type = other RNA
catgtaatgacacttcttg

SEQ ID NO: 51 - RNA, 19 nt, synthetic construct
  source 1..19: mol_type = other RNA
atgtaatgacacttcttgt

SEQ ID NO: 52 - RNA, 19 nt, synthetic construct
  source 1..19: mol_type = other RNA
tgtaatgacacttcttgtg

SEQ ID NO: 53 - RNA, 19 nt, synthetic construct
  source 1..19: mol_type = other RNA
caagcaaagtattgtgaaa

SEQ ID NO: 54 - RNA, 19 nt, synthetic construct
  source 1..19: mol_type = other RNA
acaagtagatcctgagaag

SEQ ID NO: 55 - RNA, 19 nt, synthetic construct
  source 1..19: mol_type = other RNA
tacctttgttacagctact

SEQ ID NO: 56 - RNA, 19 nt, synthetic construct
  source 1..19: mol_type = other RNA
cctttgtaattgacactat

SEQ ID NO: 57 - RNA, 19 nt, synthetic construct
  source 1..19: mol_type = other RNA
ctggatttcagtaaggcaa

SEQ ID NO: 58 - RNA, 19 nt, synthetic construct
  source 1..19: mol_type = other RNA
ttggatttcagtaaccgtt

SEQ ID NO: 59 - RNA, 19 nt, synthetic construct
  source 1..19: mol_type = other RNA
ntggatttcagtaaccgtt

SEQ ID NO: 60 - RNA, 19 nt, synthetic construct
  source 1..19: mol_type = other RNA
ttggatttcagtaaccgtn

SEQ ID NO: 61 - RNA, 19 nt, synthetic construct
  source 1..19: mol_type = other RNA
ntggatttcagtaaccgtn

SEQ ID NO: 62 - RNA, 19 nt, synthetic construct
  source 1..19: mol_type = other RNA
gttaggctctggatttcag

SEQ ID NO: 63 - RNA, 19 nt, synthetic construct
  source 1..19: mol_type = other RNA
tttaggctctggatttcag

SEQ ID NO: 64 - RNA, 19 nt, synthetic construct
  source 1..19: mol_type = other RNA
nttaggctctggatttcag

SEQ ID NO: 65 - RNA, 19 nt, synthetic construct
  source 1..19: mol_type = other RNA
tttaggctctggatttcan

SEQ ID NO: 66 - RNA, 19 nt, synthetic construct
  source 1..19: mol_type = other RNA
nttaggctctggatttcan

SEQ ID NO: 67 - RNA, 19 nt, synthetic construct
  source 1..19: mol_type = other RNA
aggttaggctctggatttc

SEQ ID NO: 68 - RNA, 19 nt, synthetic construct
  source 1..19: mol_type = other RNA
tggttaggctctggatttc

SEQ ID NO: 69 - RNA, 19 nt, synthetic construct
  source 1..19: mol_type = other RNA
nggttaggctctggatttc

SEQ ID NO: 70 - RNA, 19 nt, synthetic construct
  source 1..19: mol_type = other RNA
nggttaggctctggatttn

SEQ ID NO: 71 - RNA, 19 nt, synthetic construct
  source 1..19: mol_type = other RNA
aggttaggctctggatttc

SEQ ID NO: 72 - RNA, 19 nt, synthetic construct
  source 1..19: mol_type = other RNA
gaaggttaggctctggatt

SEQ ID NO: 73 - RNA, 19 nt, synthetic construct
  source 1..19: mol_type = other RNA
taaggttaggctctggatt

SEQ ID NO: 74 - RNA, 19 nt, synthetic construct
  source 1..19: mol_type = other RNA
naaggttaggctctggatt

SEQ ID NO: 75 - RNA, 19 nt, synthetic construct
  source 1..19: mol_type = other RNA
taaggttaggctctggatn

SEQ ID NO: 76 - RNA, 19 nt, synthetic construct
  source 1..19: mol_type = other RNA
naaggttaggctctggatn

SEQ ID NO: 77 - RNA, 19 nt, synthetic construct
  source 1..19: mol_type = other RNA
attgaaggttaggctctgg

SEQ ID NO: 78 - RNA, 19 nt, synthetic construct
  source 1..19: mol_type = other RNA
tttgaaggttaggctctgg

SEQ ID NO: 79 - RNA, 19 nt, synthetic construct
  source 1..19: mol_type = other RNA
nttgaaggttaggctctgg

SEQ ID NO: 80 - RNA, 19 nt, synthetic construct
  source 1..19: mol_type = other RNA
attgaaggttaggctctgn

SEQ ID NO: 81 - RNA, 19 nt, synthetic construct
  source 1..19: mol_type = other RNA
nttgaaggttaggctctgn

SEQ ID NO: 82 - RNA, 19 nt, synthetic construct
  source 1..19: mol_type = other RNA
gattgaaggttaggctctg

SEQ ID NO: 83 - RNA, 19 nt, synthetic construct
  source 1..19: mol_type = other RNA
aattgaaggttaggctctg

SEQ ID NO: 84 - RNA, 19 nt, synthetic construct
  source 1..19: mol_type = other RNA
tattgaaggttaggctctg

SEQ ID NO: 85 - RNA, 19 nt, synthetic construct
  source 1..19: mol_type = other RNA
nattgaaggttaggctctg

SEQ ID NO: 86 - RNA, 19 nt, synthetic construct
  source 1..19: mol_type = other RNA
nattgaaggttaggctctn

SEQ ID NO: 87 - RNA, 19 nt, synthetic construct
  source 1..19: mol_type = other RNA
ggattgaaggttaggctct

SEQ ID NO: 88 - RNA, 19 nt, synthetic construct
  source 1..19: mol_type = other RNA
agattgaaggttaggctct

SEQ ID NO: 89 - RNA, 19 nt, synthetic construct
  source 1..19: mol_type = other RNA
tgattgaaggttaggctct

SEQ ID NO: 90 - RNA, 19 nt, synthetic construct
  source 1..19: mol_type = other RNA
ngattgaaggttaggctct

SEQ ID NO: 91 - RNA, 19 nt, synthetic construct
  source 1..19: mol_type = other RNA
ngattgaaggttaggctcn

SEQ ID NO: 92 - RNA, 19 nt, synthetic construct
  source 1..19: mol_type = other RNA
gggattgaaggttaggctc

SEQ ID NO: 93 - RNA, 19 nt, synthetic construct
  source 1..19: mol_type = other RNA
aggattgaaggttaggctc

SEQ ID NO: 94 - RNA, 19 nt, synthetic construct
  source 1..19: mol_type = other RNA
tggattgaaggttaggctc

SEQ ID NO: 95 - RNA, 19 nt, synthetic construct
  source 1..19: mol_type = other RNA
nggattgaaggttaggctc

SEQ ID NO: 96 - RNA, 19 nt, synthetic construct
  source 1..19: mol_type = other RNA
nggattgaaggttaggctn

SEQ ID NO: 97 - RNA, 19 nt, synthetic construct
  source 1..19: mol_type = other RNA
tgggattgaaggttaggct

SEQ ID NO: 98 - RNA, 19 nt, synthetic construct
  source 1..19: mol_type = other RNA
ngggattgaaggttaggct

SEQ ID NO: 99 - RNA, 19 nt, synthetic construct
  source 1..19: mol_type = other RNA
tgggattgaaggttaggcn

SEQ ID NO: 100 - RNA, 19 nt, synthetic construct
  source 1..19: mol_type = other RNA
ngggattgaaggttaggcn

SEQ ID NO: 101 - RNA, 19 nt, synthetic construct
  source 1..19: mol_type = other RNA
ccttagttttcatggcgaa

SEQ ID NO: 102 - RNA, 19 nt, synthetic construct
  source 1..19: mol_type = other RNA
acttagttttcatggcgaa

SEQ ID NO: 103 - RNA, 19 nt, synthetic construct
  source 1..19: mol_type = other RNA
tcttagttttcatggcgaa

SEQ ID NO: 104 - RNA, 19 nt, synthetic construct
  source 1..19: mol_type = other RNA
ncttagttttcatggcgaa

SEQ ID NO: 105 - RNA, 19 nt, synthetic construct
  source 1..19: mol_type = other RNA
ncttagttttcatggcgan

SEQ ID NO: 106 - RNA, 19 nt, synthetic construct
  source 1..19: mol_type = other RNA
ccagatagctaaggcagcc

SEQ ID NO: 107 - RNA, 19 nt, synthetic construct
  source 1..19: mol_type = other RNA
acagatagctaaggcagcc

SEQ ID NO: 108 - RNA, 19 nt, synthetic construct
  source 1..19: mol_type = other RNA
tcagatagctaaggcagcc

SEQ ID NO: 109 - RNA, 19 nt, synthetic construct
  source 1..19: mol_type = other RNA
ncagatagctaaggcagcc

SEQ ID NO: 110 - RNA, 19 nt, synthetic construct
  source 1..19: mol_type = other RNA
ncagatagctaaggcagcn

SEQ ID NO: 111 - RNA, 19 nt, synthetic construct
  source 1..19: mol_type = other RNA
ctgagtttccgaatagcct

SEQ ID NO: 112 - RNA, 19 nt, synthetic construct
  source 1..19: mol_type = other RNA
atgagtttccgaatagcct

SEQ ID NO: 113 - RNA, 19 nt, synthetic construct
  source 1..19: mol_type = other RNA
ttgagtttccgaatagcct

SEQ ID NO: 114 - RNA, 19 nt, synthetic construct
  source 1..19: mol_type = other RNA
ntgagtttccgaatagcct

SEQ ID NO: 115 - RNA, 19 nt, synthetic construct
  source 1..19: mol_type = other RNA
ntgagtttccgaatagccn

SEQ ID NO: 116 - RNA, 19 nt, synthetic construct
  source 1..19: mol_type = other RNA
ttatctgagtttccgaata

SEQ ID NO: 117 - RNA, 19 nt, synthetic construct
  source 1..19: mol_type = other RNA
atatctgagtttccgaata

SEQ ID NO: 118 - RNA, 19 nt, synthetic construct
  source 1..19: mol_type = other RNA
ntatctgagtttccgaata

SEQ ID NO: 119 - RNA, 19 nt, synthetic construct
  source 1..19: mol_type = other RNA
ntatctgagtttccgaatn

SEQ ID NO: 120 - RNA, 19 nt, synthetic construct
  source 1..19: mol_type = other RNA
tttatctgagtttccgaat

SEQ ID NO: 121 - RNA, 19 nt, synthetic construct
  source 1..19: mol_type = other RNA
attatctgagtttccgaat

SEQ ID NO: 122 - RNA, 19 nt, synthetic construct
  source 1..19: mol_type = other RNA
nttatctgagtttccgaat

SEQ ID NO: 123 - RNA, 19 nt, synthetic construct
  source 1..19: mol_type = other RNA
nttatctgagtttccgaan

SEQ ID NO: 124 - RNA, 19 nt, synthetic construct
  source 1..19: mol_type = other RNA
atttatctgagtttccgaa

SEQ ID NO: 125 - RNA, 19 nt, synthetic construct
  source 1..19: mol_type = other RNA
ntttatctgagtttccgaa

SEQ ID NO: 126 - RNA, 19 nt, synthetic construct
  source 1..19: mol_type = other RNA
atttatctgagtttccgan

SEQ ID NO: 127 - RNA, 19 nt, synthetic construct
  source 1..19: mol_type = other RNA
ntttatctgagtttccgan

SEQ ID NO: 128 - RNA, 19 nt, synthetic construct
  source 1..19: mol_type = other RNA
atttatctgagtttccgaa

SEQ ID NO: 129 - RNA, 19 nt, synthetic construct
  source 1..19: mol_type = other RNA
ntttatctgagtttccgaa

SEQ ID NO: 130 - RNA, 19 nt, synthetic construct
  source 1..19: mol_type = other RNA
atttatctgagtttccgan

SEQ ID NO: 131 - RNA, 19 nt, synthetic construct
  source 1..19: mol_type = other RNA
ntttatctgagtttccgan

SEQ ID NO: 132 - RNA, 19 nt, synthetic construct
  source 1..19: mol_type = other RNA
catttatctgagtttccga

SEQ ID NO: 133 - RNA, 19 nt, synthetic construct
  source 1..19: mol_type = other RNA
aatttatctgagtttccga

SEQ ID NO: 134 - RNA, 19 nt, synthetic construct
  source 1..19: mol_type = other RNA
tatttatctgagtttccga

SEQ ID NO: 135 - RNA, 19 nt, synthetic construct
  source 1..19: mol_type = other RNA
natttatctgagtttccga

SEQ ID NO: 136 - RNA, 19 nt, synthetic construct
  source 1..19: mol_type = other RNA
natttatctgagtttccgn

SEQ ID NO: 137 - RNA, 19 nt, synthetic construct
  source 1..19: mol_type = other RNA
ttagcatttatctgagttt

SEQ ID NO: 138 - RNA, 19 nt, synthetic construct
  source 1..19: mol_type = other RNA
ntagcatttatctgagttt

SEQ ID NO: 139 - RNA, 19 nt, synthetic construct
  source 1..19: mol_type = other RNA
ttagcatttatctgagttc

SEQ ID NO: 140 - RNA, 19 nt, synthetic construct
  source 1..19: mol_type = other RNA
ttagcatttatctgagttc

SEQ ID NO: 141 - RNA, 19 nt, synthetic construct
  source 1..19: mol_type = other RNA
ttagcatttatctgagttn

SEQ ID NO: 142 - RNA, 19 nt, synthetic construct
  source 1..19: mol_type = other RNA
ntagcatttatctgagttn

SEQ ID NO: 143 - RNA, 19 nt, synthetic construct
  source 1..19: mol_type = other RNA
ttagcatttatctgagttn

SEQ ID NO: 144 - RNA, 19 nt, synthetic construct
  source 1..19: mol_type = other RNA
ntagcatttatctgagttn

SEQ ID NO: 145 - RNA, 19 nt, synthetic construct
  source 1..19: mol_type = other RNA
tcttcattgcctgagtagc

SEQ ID NO: 146 - RNA, 19 nt, synthetic construct
  source 1..19: mol_type = other RNA
acttcattgcctgagtagc

SEQ ID NO: 147 - RNA, 19 nt, synthetic construct
  source 1..19: mol_type = other RNA
ncttcattgcctgagtagc

SEQ ID NO: 148 - RNA, 19 nt, synthetic construct
  source 1..19: mol_type = other RNA
ncttcattgcctgagtagn

SEQ ID NO: 149 - RNA, 19 nt, synthetic construct
  source 1..19: mol_type = other RNA
ttcttcattgcctgagtag

SEQ ID NO: 150 - RNA, 19 nt, synthetic construct
  source 1..19: mol_type = other RNA
atcttcattgcctgagtag

SEQ ID NO: 151 - RNA, 19 nt, synthetic construct
  source 1..19: mol_type = other RNA
ntcttcattgcctgagtag

SEQ ID NO: 152 - RNA, 19 nt, synthetic construct
  source 1..19: mol_type = other RNA
ntcttcattgcctgagtan

SEQ ID NO: 153 - RNA, 19 nt, synthetic construct
  source 1..19: mol_type = other RNA
tttattggttgtgactttc

SEQ ID NO: 154 - RNA, 19 nt, synthetic construct
  source 1..19: mol_type = other RNA
atttattggttgtgacttt

SEQ ID NO: 155 - RNA, 19 nt, synthetic construct
  source 1..19: mol_type = other RNA
tgactttcctttttctcct

SEQ ID NO: 156 - RNA, 19 nt, synthetic construct
  source 1..19: mol_type = other RNA
agactttcctttttctcct

SEQ ID NO: 157 - RNA, 19 nt, synthetic construct
  source 1..19: mol_type = other RNA
ngactttcctttttctcct

SEQ ID NO: 158 - RNA, 19 nt, synthetic construct
  source 1..19: mol_type = other RNA
ngactttcctttttctccn

SEQ ID NO: 159 - RNA, 19 nt, synthetic construct
  source 1..19: mol_type = other RNA
ttgactttcctttttctcc

SEQ ID NO: 160 - RNA, 19 nt, synthetic construct
  source 1..19: mol_type = other RNA
ggttgtgactttccttttt

SEQ ID NO: 161 - RNA, 19 nt, synthetic construct
  source 1..19: mol_type = other RNA
agttgtgactttccttttt

SEQ ID NO: 162 - RNA, 19 nt, synthetic construct
  source 1..19: mol_type = other RNA
tgttgtgactttccttttt

SEQ ID NO: 163 - RNA, 19 nt, synthetic construct
  source 1..19: mol_type = other RNA
ngttgtgactttccttttt

SEQ ID NO: 164 - RNA, 19 nt, synthetic construct
  source 1..19: mol_type = other RNA
ngttgtgactttccttttn

SEQ ID NO: 165 - RNA, 19 nt, synthetic construct
  source 1..19: mol_type = other RNA
ttggttgtgactttccttt

SEQ ID NO: 166 - RNA, 19 nt, synthetic construct
  source 1..19: mol_type = other RNA
atggttgtgactttccttt

SEQ ID NO: 167 - RNA, 19 nt, synthetic construct
  source 1..19: mol_type = other RNA
ntggttgtgactttccttt

SEQ ID NO: 168 - RNA, 19 nt, synthetic construct
  source 1..19: mol_type = other RNA
ntggttgtgactttccttn

SEQ ID NO: 169 - RNA, 19 nt, synthetic construct
  source 1..19: mol_type = other RNA
tattggttgtgactttcct

SEQ ID NO: 170 - RNA, 19 nt, synthetic construct
  source 1..19: mol_type = other RNA
aattggttgtgactttcct

SEQ ID NO: 171 - RNA, 19 nt, synthetic construct
  source 1..19: mol_type = other RNA
nattggttgtgactttcct

SEQ ID NO: 172 - RNA, 19 nt, synthetic construct
  source 1..19: mol_type = other RNA
nattggttgtgactttccn

SEQ ID NO: 173 - RNA, 19 nt, synthetic construct
  source 1..19: mol_type = other RNA
tttattggttgtgactttc

SEQ ID NO: 174 - RNA, 19 nt, synthetic construct
  source 1..19: mol_type = other RNA
attattggttgtgactttc

SEQ ID NO: 175 - RNA, 19 nt, synthetic construct
  source 1..19: mol_type = other RNA
nttattggttgtgactttc

SEQ ID NO: 176 - RNA, 19 nt, synthetic construct
  source 1..19: mol_type = other RNA
nttattggttgtgactttn

SEQ ID NO: 177 - RNA, 19 nt, synthetic construct
  source 1..19: mol_type = other RNA
atttattggttgtgacttt

SEQ ID NO: 178 - RNA, 19 nt, synthetic construct
  source 1..19: mol_type = other RNA
ttttattggttgtgacttt

SEQ ID NO: 179 - RNA, 19 nt, synthetic construct
  source 1..19: mol_type = other RNA
ntttattggttgtgacttt

SEQ ID NO: 180 - RNA, 19 nt, synthetic construct
  source 1..19: mol_type = other RNA
ntttattggttgtgacttn

SEQ ID NO: 181 - RNA, 19 nt, synthetic construct
  source 1..19: mol_type = other RNA
catttattggttgtgactt

SEQ ID NO: 182 - RNA, 19 nt, synthetic construct
  source 1..19: mol_type = other RNA
tatttattggttgtgactt

SEQ ID NO: 183 - RNA, 19 nt, synthetic construct
  source 1..19: mol_type = other RNA
natttattggttgtgactt

SEQ ID NO: 184 - RNA, 19 nt, synthetic construct
  source 1..19: mol_type = other RNA
tatttattggttgtgactn

SEQ ID NO: 185 - RNA, 19 nt, synthetic construct
  source 1..19: mol_type = other RNA
natttattggttgtgactn

SEQ ID NO: 186 - RNA, 19 nt, synthetic construct
  source 1..19: mol_type = other RNA
catttattggttgtgactt

SEQ ID NO: 187 - RNA, 19 nt, synthetic construct
  source 1..19: mol_type = other RNA
tatttattggttgtgactt

SEQ ID NO: 188 - RNA, 19 nt, synthetic construct
  source 1..19: mol_type = other RNA
natttattggttgtgactt

SEQ ID NO: 189 - RNA, 19 nt, synthetic construct
  source 1..19: mol_type = other RNA
tatttattggttgtgactn

SEQ ID NO: 190 - RNA, 19 nt, synthetic construct
  source 1..19: mol_type = other RNA
natttattggttgtgactn

SEQ ID NO: 191 - RNA, 19 nt, synthetic construct
  source 1..19: mol_type = other RNA
gacatttattggttgtgac

SEQ ID NO: 192 - RNA, 19 nt, synthetic construct
  source 1..19: mol_type = other RNA
tacatttattggttgtgac

SEQ ID NO: 193 - RNA, 19 nt, synthetic construct
  source 1..19: mol_type = other RNA
nacatttattggttgtgac

SEQ ID NO: 194 - RNA, 19 nt, synthetic construct
  source 1..19: mol_type = other RNA
tacatttattggttgtgan

SEQ ID NO: 195 - RNA, 19 nt, synthetic construct
  source 1..19: mol_type = other RNA
nacatttattggttgtgan

SEQ ID NO: 196 - RNA, 19 nt, synthetic construct
  source 1..19: mol_type = other RNA
agacatttattggttgtga

SEQ ID NO: 197 - RNA, 19 nt, synthetic construct
  source 1..19: mol_type = other RNA
tgacatttattggttgtga

SEQ ID NO: 198 - RNA, 19 nt, synthetic construct
  source 1..19: mol_type = other RNA
ngacatttattggttgtga

SEQ ID NO: 199 - RNA, 19 nt, synthetic construct
  source 1..19: mol_type = other RNA
tgacatttattggttgtgn

SEQ ID NO: 200 - RNA, 19 nt, synthetic construct
  source 1..19: mol_type = other RNA
agacatttattggttgtgn

SEQ ID NO: 201 - RNA, 19 nt, synthetic construct
  source 1..19: mol_type = other RNA
ngacatttattggttgtgn

SEQ ID NO: 202 - RNA, 19 nt, synthetic construct
  source 1..19: mol_type = other RNA
agacgtttattggttgtga

SEQ ID NO: 203 - RNA, 19 nt, synthetic construct
  source 1..19: mol_type = other RNA
tgacgtttattggttgtga

SEQ ID NO: 204 - RNA, 19 nt, synthetic construct
  source 1..19: mol_type = other RNA
ngacgtttattggttgtga

SEQ ID NO: 205 - RNA, 19 nt, synthetic construct
  source 1..19: mol_type = other RNA
tgacgtttattggttgtgn

SEQ ID NO: 206 - RNA, 19 nt, synthetic construct
  source 1..19: mol_type = other RNA
ngacgtttattggttgtgn

SEQ ID NO: 207 - RNA, 19 nt, synthetic construct
  source 1..19: mol_type = other RNA
agacgtttattggttgtga

SEQ ID NO: 208 - RNA, 19 nt, synthetic construct
  source 1..19: mol_type = other RNA
tgacgtttattggttgtga

SEQ ID NO: 209 - RNA, 19 nt, synthetic construct
  source 1..19: mol_type = other RNA
agacgtttattggttgtgn

SEQ ID NO: 210 - RNA, 19 nt, synthetic construct
  source 1..19: mol_type = other RNA
ngacgtttattggttgtga

SEQ ID NO: 211 - RNA, 19 nt, synthetic construct
  source 1..19: mol_type = other RNA
ngacgtttattggttgtgn

SEQ ID NO: 212 - RNA, 19 nt, synthetic construct
  source 1..19: mol_type = other RNA
gacacttgttccagacatt

SEQ ID NO: 213 - RNA, 19 nt, synthetic construct
  source 1..19: mol_type = other RNA
tacacttgttccagacatt

SEQ ID NO: 214 - RNA, 19 nt, synthetic construct
  source 1..19: mol_type = other RNA
aacacttgttccagacatt

SEQ ID NO: 215 - RNA, 19 nt, synthetic construct
  source 1..19: mol_type = other RNA
nacacttgttccagacatt

SEQ ID NO: 216 - RNA, 19 nt, synthetic construct
  source 1..19: mol_type = other RNA
nacacttgttccagacatn

SEQ ID NO: 217 - RNA, 19 nt, synthetic construct
  source 1..19: mol_type = other RNA
gtgacacttgttccagaca

SEQ ID NO: 218 - RNA, 19 nt, synthetic construct
  source 1..19: mol_type = other RNA
ttgacacttgttccagaca

SEQ ID NO: 219 - RNA, 19 nt, synthetic construct
  source 1..19: mol_type = other RNA
atgacacttgttccagaca

SEQ ID NO: 220 - RNA, 19 nt, synthetic construct
  source 1..19: mol_type = other RNA
ntgacacttgttccagaca

SEQ ID NO: 221 - RNA, 19 nt, synthetic construct
  source 1..19: mol_type = other RNA
ntgacacttgttccagacn

SEQ ID NO: 222 - RNA, 19 nt, synthetic construct
  source 1..19: mol_type = other RNA
aattgtgacacttgttcca

SEQ ID NO: 223 - RNA, 19 nt, synthetic construct
  source 1..19: mol_type = other RNA
tattgtgacacttgttcca

SEQ ID NO: 224 - RNA, 19 nt, synthetic construct
  source 1..19: mol_type = other RNA
nattgtgacacttgttcca

SEQ ID NO: 225 - RNA, 19 nt, synthetic construct
  source 1..19: mol_type = other RNA
nattgtgacacttgttccn

SEQ ID NO: 226 - RNA, 19 nt, synthetic construct
  source 1..19: mol_type = other RNA
taattgtgacacttgttcc

SEQ ID NO: 227 - RNA, 19 nt, synthetic construct
  source 1..19: mol_type = other RNA
aaattgtgacacttgttcc

SEQ ID NO: 228 - RNA, 19 nt, synthetic construct
  source 1..19: mol_type = other RNA
naattgtgacacttgttcc

SEQ ID NO: 229 - RNA, 19 nt, synthetic construct
  source 1..19: mol_type = other RNA
naattgtgacacttgttcn

SEQ ID NO: 230 - RNA, 19 nt, synthetic construct
  source 1..19: mol_type = other RNA
gtaattgtgacacttgttc

SEQ ID NO: 231 - RNA, 19 nt, synthetic construct
  source 1..19: mol_type = other RNA
ttaattgtgacacttgttc

SEQ ID NO: 232 - RNA, 19 nt, synthetic construct
  source 1..19: mol_type = other RNA
ataattgtgacacttgttc

SEQ ID NO: 233 - RNA, 19 nt, synthetic construct
  source 1..19: mol_type = other RNA
ntaattgtgacacttgttc

SEQ ID NO: 234 - RNA, 19 nt, synthetic construct
  source 1..19: mol_type = other RNA
ntaattgtgacacttgttn

SEQ ID NO: 235 - RNA, 19 nt, synthetic construct
  source 1..19: mol_type = other RNA
tgtaattgtgacacttgtt

SEQ ID NO: 236 - RNA, 19 nt, synthetic construct
  source 1..19: mol_type = other RNA
agtaattgtgacacttgtt

SEQ ID NO: 237 - RNA, 19 nt, synthetic construct
  source 1..19: mol_type = other RNA
ngtaattgtgacacttgtt

SEQ ID NO: 238 - RNA, 19 nt, synthetic construct
  source 1..19: mol_type = other RNA
ngtaattgtgacacttgtn

SEQ ID NO: 239 - RNA, 19 nt, synthetic construct
  source 1..19: mol_type = other RNA
cagtaaaggtcgattgaag

SEQ ID NO: 240 - RNA, 19 nt, synthetic construct
  source 1..19: mol_type = other RNA
tagtaaaggtcgattgaag

SEQ ID NO: 241 - RNA, 19 nt, synthetic construct
  source 1..19: mol_type = other RNA
aagtaaaggtcgattgaag

SEQ ID NO: 242 - RNA, 19 nt, synthetic construct
  source 1..19: mol_type = other RNA
nagtaaaggtcgattgaag

SEQ ID NO: 243 - RNA, 19 nt, synthetic construct
  source 1..19: mol_type = other RNA
nagtaaaggtcgattgaan

SEQ ID NO: 244 - RNA, 19 nt, synthetic construct
  source 1..19: mol_type = other RNA
ataataaagatggtttact

SEQ ID NO: 245 - RNA, 19 nt, synthetic construct
  source 1..19: mol_type = other RNA
ttaataaagatggtttact

SEQ ID NO: 246 - RNA, 19 nt, synthetic construct
  source 1..19: mol_type = other RNA
ntaataaagatggtttact

SEQ ID NO: 247 - RNA, 19 nt, synthetic construct
  source 1..19: mol_type = other RNA
ntaataaagatggtttacn

SEQ ID NO: 248 - RNA, 19 nt, synthetic construct
  source 1..19: mol_type = other RNA
ttttggtgctgtgaaatat

SEQ ID NO: 249 - RNA, 19 nt, synthetic construct
  source 1..19: mol_type = other RNA
atttggtgctgtgaaatat

SEQ ID NO: 250 - RNA, 19 nt, synthetic construct
  source 1..19: mol_type = other RNA
ntttggtgctgtgaaatat

SEQ ID NO: 251 - RNA, 19 nt, synthetic construct
  source 1..19: mol_type = other RNA
ntttggtgctgtgaaatan

SEQ ID NO: 252 - RNA, 19 nt, synthetic construct
  source 1..19: mol_type = other RNA
cacagttagagttaatgtt

SEQ ID NO: 253 - RNA, 19 nt, synthetic construct
  source 1..19: mol_type = other RNA
tacagttagagttaatgtt

SEQ ID NO: 254 - RNA, 19 nt, synthetic construct
  source 1..19: mol_type = other RNA
aacagttagagttaatgtt

SEQ ID NO: 255 - RNA, 19 nt, synthetic construct
  source 1..19: mol_type = other RNA
nacagttagagttaatgtt

SEQ ID NO: 256 - RNA, 19 nt, synthetic construct
  source 1..19: mol_type = other RNA
nacagttagagttaatgtn

SEQ ID NO: 257 - RNA, 19 nt, synthetic construct
  source 1..19: mol_type = other RNA
taagttaagaaactcttct

SEQ ID NO: 258 - RNA, 19 nt, synthetic construct
  source 1..19: mol_type = other RNA
aaagttaagaaactcttct

SEQ ID NO: 259 - RNA, 19 nt, synthetic construct
  source 1..19: mol_type = other RNA
naagttaagaaactcttct

SEQ ID NO: 260 - RNA, 19 nt, synthetic construct
  source 1..19: mol_type = other RNA
naagttaagaaactcttcn

SEQ ID NO: 261 - RNA, 19 nt, synthetic construct
  source 1..19: mol_type = other RNA
agtaagttaagaaactctt

SEQ ID NO: 262 - RNA, 19 nt, synthetic construct
  source 1..19: mol_type = other RNA
tgtaagttaagaaactctt

SEQ ID NO: 263 - RNA, 19 nt, synthetic construct
  source 1..19: mol_type = other RNA
agtaagttaagaaactctt

SEQ ID NO: 264 - RNA, 19 nt, synthetic construct
  source 1..19: mol_type = other RNA
ngtaagttaagaaactctn

SEQ ID NO: 265 - RNA, 19 nt, synthetic construct
  source 1..19: mol_type = other RNA
tcaacatttgaggagtagt

SEQ ID NO: 266 - RNA, 19 nt, synthetic construct
  source 1..19: mol_type = other RNA
acaacatttgaggagtagt

SEQ ID NO: 267 - RNA, 19 nt, synthetic construct
  source 1..19: mol_type = other RNA
ncaacatttgaggagtagt

SEQ ID NO: 268 - RNA, 19 nt, synthetic construct
  source 1..19: mol_type = other RNA
ncaacatttgaggagtagn

SEQ ID NO: 269 - RNA, 19 nt, synthetic construct
  source 1..19: mol_type = other RNA
cagtcatcaatgttatgga

SEQ ID NO: 270 - RNA, 19 nt, synthetic construct
  source 1..19: mol_type = other RNA
tagtcatcaatgttatgga

SEQ ID NO: 271 - RNA, 19 nt, synthetic construct
  source 1..19: mol_type = other RNA
aagtcatcaatgttatgga

SEQ ID NO: 272 - RNA, 19 nt, synthetic construct
  source 1..19: mol_type = other RNA
nagtcatcaatgttatgga

SEQ ID NO: 273 - RNA, 19 nt, synthetic construct
  source 1..19: mol_type = other RNA
nagtcatcaatgttatggn

SEQ ID NO: 274 - RNA, 19 nt, synthetic construct
  source 1..19: mol_type = other RNA
catgaagccagtcatcaat

SEQ ID NO: 275 - RNA, 19 nt, synthetic construct
  source 1..19: mol_type = other RNA
tatgaagccagtcatcaat

SEQ ID NO: 276 - RNA, 19 nt, synthetic construct
  source 1..19: mol_type = other RNA
aatgaagccagtcatcaat

SEQ ID NO: 277 - RNA, 19 nt, synthetic construct
  source 1..19: mol_type = other RNA
natgaagccagtcatcaat

SEQ ID NO: 278 - RNA, 19 nt, synthetic construct
  source 1..19: mol_type = other RNA
natgaagccagtcatcaan

SEQ ID NO: 279 - RNA, 19 nt, synthetic construct
  source 1..19: mol_type = other RNA
aagtttaggtgctatcatt

SEQ ID NO: 280 - RNA, 19 nt, synthetic construct
  source 1..19: mol_type = other RNA
tagtttaggtgctatcatt

SEQ ID NO: 281 - RNA, 19 nt, synthetic construct
  source 1..19: mol_type = other RNA
nagtttaggtgctatcatt

SEQ ID NO: 282 - RNA, 19 nt, synthetic construct
  source 1..19: mol_type = other RNA
nagtttaggtgctatcatn

SEQ ID NO: 283 - RNA, 19 nt, synthetic construct
  source 1..19: mol_type = other RNA
tgtagaaggaatgtctgtc

SEQ ID NO: 284 - RNA, 19 nt, synthetic construct
  source 1..19: mol_type = other RNA
agtagaaggaatgtctgtc

SEQ ID NO: 285 - RNA, 19 nt, synthetic construct
  source 1..19: mol_type = other RNA
ngtagaaggaatgtctgtc

SEQ ID NO: 286 - RNA, 19 nt, synthetic construct
  source 1..19: mol_type = other RNA
ngtagaaggaatgtctgtn

SEQ ID NO: 287 - RNA, 19 nt, synthetic construct
  source 1..19: mol_type = other RNA
tacatgtagaaggaatgtc

SEQ ID NO: 288 - RNA, 19 nt, synthetic construct
  source 1..19: mol_type = other RNA
aacatgtagaaggaatgtc

SEQ ID NO: 289 - RNA, 19 nt, synthetic construct
  source 1..19: mol_type = other RNA
nacatgtagaaggaatgtc

SEQ ID NO: 290 - RNA, 19 nt, synthetic construct
  source 1..19: mol_type = other RNA
nacatgtagaaggaatgtn

SEQ ID NO: 291 - RNA, 19 nt, synthetic construct
  source 1..19: mol_type = other RNA
caagaagtgtcattacatg

SEQ ID NO: 292 - RNA, 19 nt, synthetic construct
  source 1..19: mol_type = other RNA
taagaagtgtcattacatg

SEQ ID NO: 293 - RNA, 19 nt, synthetic construct
  source 1..19: mol_type = other RNA
aaagaagtgtcattacatg

SEQ ID NO: 294 - RNA, 19 nt, synthetic construct
  source 1..19: mol_type = other RNA
naagaagtgtcattacatg

SEQ ID NO: 295 - RNA, 19 nt, synthetic construct
  source 1..19: mol_type = other RNA
naagaagtgtcattacatn

SEQ ID NO: 296 - RNA, 19 nt, synthetic construct
  source 1..19: mol_type = other RNA
acaagaagtgtcattacat

SEQ ID NO: 297 - RNA, 19 nt, synthetic construct
  source 1..19: mol_type = other RNA
tcaagaagtgtcattacat

SEQ ID NO: 298 - RNA, 19 nt, synthetic construct
  source 1..19: mol_type = other RNA
ncaagaagtgtcattacat

SEQ ID NO: 299 - RNA, 19 nt, synthetic construct
  source 1..19: mol_type = other RNA
ncaagaagtgtcattacan

SEQ ID NO: 300 - RNA, 19 nt, synthetic construct
  source 1..19: mol_type = other RNA
cacaagaagtgtcattaca

SEQ ID NO: 301 - RNA, 19 nt, synthetic construct
  source 1..19: mol_type = other RNA
tacaagaagtgtcattaca

SEQ ID NO: 302 - RNA, 19 nt, synthetic construct
  source 1..19: mol_type = other RNA
aacaagaagtgtcattaca

SEQ ID NO: 303 - RNA, 19 nt, synthetic construct
  source 1..19: mol_type = other RNA
nacaagaagtgtcattaca

SEQ ID NO: 304 - RNA, 19 nt, synthetic construct
  source 1..19: mol_type = other RNA
nacaagaagtgtcattacn

SEQ ID NO: 305 - RNA, 19 nt, synthetic construct
  source 1..19: mol_type = other RNA
tttcacaatactttgcttg

SEQ ID NO: 306 - RNA, 19 nt, synthetic construct
  source 1..19: mol_type = other RNA
attcacaatactttgcttg

SEQ ID NO: 307 - RNA, 19 nt, synthetic construct
  source 1..19: mol_type = other RNA
nttcacaatactttgcttg

SEQ ID NO: 308 - RNA, 19 nt, synthetic construct
  source 1..19: mol_type = other RNA
nttcacaatactttgcttn

SEQ ID NO: 309 - RNA, 19 nt, synthetic construct
  source 1..19: mol_type = other RNA
cttctcaggatctacttgt

SEQ ID NO: 310 - RNA, 19 nt, synthetic construct
  source 1..19: mol_type = other RNA
tttctcaggatctacttgt

SEQ ID NO: 311 - RNA, 19 nt, synthetic construct
  source 1..19: mol_type = other RNA
attctcaggatctacttgt

SEQ ID NO: 312 - RNA, 19 nt, synthetic construct
  source 1..19: mol_type = other RNA
nttctcaggatctacttgt

SEQ ID NO: 313 - RNA, 19 nt, synthetic construct
  source 1..19: mol_type = other RNA
nttctcaggatctacttgn

SEQ ID NO: 314 - RNA, 19 nt, synthetic construct
  source 1..19: mol_type = other RNA
agtagctgtaacaaaggta

SEQ ID NO: 315 - RNA, 19 nt, synthetic construct
  source 1..19: mol_type = other RNA
tgtagctgtaacaaaggta

SEQ ID NO: 316 - RNA, 19 nt, synthetic construct
  source 1..19: mol_type = other RNA
ngtagctgtaacaaaggta

SEQ ID NO: 317 - RNA, 19 nt, synthetic construct
  source 1..19: mol_type = other RNA
ngtagctgtaacaaaggtn

SEQ ID NO: 318 - RNA, 19 nt, synthetic construct
  source 1..19: mol_type = other RNA
atagtgtcaattacaaagg

SEQ ID NO: 319 - RNA, 19 nt, synthetic construct
  source 1..19: mol_type = other RNA
ttagtgtcaattacaaagg

SEQ ID NO: 320 - RNA, 19 nt, synthetic construct
  source 1..19: mol_type = other RNA
ntagtgtcaattacaaagg

SEQ ID NO: 321 - RNA, 19 nt, synthetic construct
  source 1..19: mol_type = other RNA
ntagtgtcaattacaaagn

SEQ ID NO: 322 - RNA, 19 nt, synthetic construct
  source 1..19: mol_type = other RNA
ttgccttactgaaatccag

SEQ ID NO: 323 - RNA, 19 nt, synthetic construct
  source 1..19: mol_type = other RNA
ttgccttactgaaatccaa

SEQ ID NO: 324 - RNA, 19 nt, synthetic construct
  source 1..19: mol_type = other RNA
ttgccttactgaaatccan

SEQ ID NO: 325 - RNA, 19 nt, synthetic construct
  source 1..19: mol_type = other RNA
ntgccttactgaaatccaa

SEQ ID NO: 326 - RNA, 19 nt, synthetic construct
  source 1..19: mol_type = other RNA
ntgccttactgaaatccan

SEQ ID NO: 327 - RNA, 19 nt, synthetic construct
  source 1..19: mol_type = other RNA
ctgaaatccagagcctaac

SEQ ID NO: 328 - RNA, 19 nt, synthetic construct
  source 1..19: mol_type = other RNA
ctgaaatccagagcctaaa

SEQ ID NO: 329 - RNA, 19 nt, synthetic construct
  source 1..19: mol_type = other RNA
ctgaaatccagagcctaan

SEQ ID NO: 330 - RNA, 19 nt, synthetic construct
  source 1..19: mol_type = other RNA
ntgaaatccagagcctaaa

SEQ ID NO: 331 - RNA, 19 nt, synthetic construct
  source 1..19: mol_type = other RNA
ntgaaatccagagcctaan

SEQ ID NO: 332 - RNA, 19 nt, synthetic construct
  source 1..19: mol_type = other RNA
gaaatccagagcctaacct

SEQ ID NO: 333 - RNA, 19 nt, synthetic construct
  source 1..19: mol_type = other RNA
gaaatccagagcctaacca

SEQ ID NO: 334 - RNA, 19 nt, synthetic construct
  source 1..19: mol_type = other RNA
gaaatccagagcctaaccn

SEQ ID NO: 335 - RNA, 19 nt, synthetic construct
  source 1..19: mol_type = other RNA
naaatccagagcctaaccn

SEQ ID NO: 336 - RNA, 19 nt, synthetic construct
  source 1..19: mol_type = other RNA
gaaatccagagcctaacct

SEQ ID NO: 337 - RNA, 19 nt, synthetic construct
  source 1..19: mol_type = other RNA
aatccagagcctaaccttc

SEQ ID NO: 338 - RNA, 19 nt, synthetic construct
  source 1..19: mol_type = other RNA
aatccagagcctaacctta

SEQ ID NO: 339 - RNA, 19 nt, synthetic construct
  source 1..19: mol_type = other RNA
aatccagagcctaaccttn

SEQ ID NO: 340 - RNA, 19 nt, synthetic construct
  source 1..19: mol_type = other RNA
aatccagagcctaaccttn

SEQ ID NO: 341 - RNA, 19 nt, synthetic construct
  source 1..19: mol_type = other RNA
natccagagcctaaccttn

SEQ ID NO: 342 - RNA, 19 nt, synthetic construct
  source 1..19: mol_type = other RNA
ccagagcctaaccttcaat

SEQ ID NO: 343 - RNA, 19 nt, synthetic construct
  source 1..19: mol_type = other RNA
ccagagcctaaccttcaaa

SEQ ID NO: 344 - RNA, 19 nt, synthetic construct
  source 1..19: mol_type = other RNA
ccagagcctaaccttcaan

SEQ ID NO: 345 - RNA, 19 nt, synthetic construct
  source 1..19: mol_type = other RNA
ncagagcctaaccttcaat

SEQ ID NO: 346 - RNA, 19 nt, synthetic construct
  source 1..19: mol_type = other RNA
ncagagcctaaccttcaan

SEQ ID NO: 347 - RNA, 19 nt, synthetic construct
  source 1..19: mol_type = other RNA
cagagcctaaccttcaatc

SEQ ID NO: 348 - RNA, 19 nt, synthetic construct
  source 1..19: mol_type = other RNA
cagagcctaaccttcaatt

SEQ ID NO: 349 - RNA, 19 nt, synthetic construct
  source 1..19: mol_type = other RNA
cagagcctaaccttcaata

SEQ ID NO: 350 - RNA, 19 nt, synthetic construct
  source 1..19: mol_type = other RNA
cagagcctaaccttcaatn

SEQ ID NO: 351 - RNA, 19 nt, synthetic construct
  source 1..19: mol_type = other RNA
nagagcctaaccttcaatn

SEQ ID NO: 352 - RNA, 19 nt, synthetic construct
  source 1..19: mol_type = other RNA
agagcctaaccttcaatcc

SEQ ID NO: 353 - RNA, 19 nt, synthetic construct
  source 1..19: mol_type = other RNA
agagcctaaccttcaatct

SEQ ID NO: 354 - RNA, 19 nt, synthetic construct
  source 1..19: mol_type = other RNA
agagcctaaccttcaatca

SEQ ID NO: 355 - RNA, 19 nt, synthetic construct
  source 1..19: mol_type = other RNA
agagcctaaccttcaatcn

SEQ ID NO: 356 - RNA, 19 nt, synthetic construct
  source 1..19: mol_type = other RNA
ngagcctaaccttcaatcn

SEQ ID NO: 357 - RNA, 19 nt, synthetic construct
  source 1..19: mol_type = other RNA
gagcctaaccttcaatccc

SEQ ID NO: 358 - RNA, 19 nt, synthetic construct
  source 1..19: mol_type = other RNA
gagcctaaccttcaatcct

SEQ ID NO: 359 - RNA, 19 nt, synthetic construct
  source 1..19: mol_type = other RNA
gagcctaaccttcaatcca

SEQ ID NO: 360 - RNA, 19 nt, synthetic construct
  source 1..19: mol_type = other RNA
gagcctaaccttcaatccn

SEQ ID NO: 361 - RNA, 19 nt, synthetic construct
  source 1..19: mol_type = other RNA
nagcctaaccttcaatccn

SEQ ID NO: 362 - RNA, 19 nt, synthetic construct
  source 1..19: mol_type = other RNA
agcctaaccttcaatccca

SEQ ID NO: 363 - RNA, 19 nt, synthetic construct
  source 1..19: mol_type = other RNA
agcctaaccttcaatcccn

SEQ ID NO: 364 - RNA, 19 nt, synthetic construct
  source 1..19: mol_type = other RNA
ngcctaaccttcaatccca

SEQ ID NO: 365 - RNA, 19 nt, synthetic construct
  source 1..19: mol_type = other RNA
ngcctaaccttcaatcccn

SEQ ID NO: 366 - RNA, 19 nt, synthetic construct
  source 1..19: mol_type = other RNA
ttcgccatgaaaactaagg

SEQ ID NO: 367 - RNA, 19 nt, synthetic construct
  source 1..19: mol_type = other RNA
ttcgccatgaaaactaagt

SEQ ID NO: 368 - RNA, 19 nt, synthetic construct
  source 1..19: mol_type = other RNA
ttcgccatgaaaactaaga

SEQ ID NO: 369 - RNA, 19 nt, synthetic construct
  source 1..19: mol_type = other RNA
ttcgccatgaaaactaagn

SEQ ID NO: 370 - RNA, 19 nt, synthetic construct
  source 1..19: mol_type = other RNA
ntcgccatgaaaactaagn

SEQ ID NO: 371 - RNA, 19 nt, synthetic construct
  source 1..19: mol_type = other RNA
ggctgccttagctatctgg

SEQ ID NO: 372 - RNA, 19 nt, synthetic construct
  source 1..19: mol_type = other RNA
ggctgccttagctatctgt

SEQ ID NO: 373 - RNA, 19 nt, synthetic construct
  source 1..19: mol_type = other RNA
ggctgccttagctatctga

SEQ ID NO: 374 - RNA, 19 nt, synthetic construct
  source 1..19: mol_type = other RNA
ggctgccttagctatctgn

SEQ ID NO: 375 - RNA, 19 nt, synthetic construct
  source 1..19: mol_type = other RNA
ngctgccttagctatctgn

SEQ ID NO: 376 - RNA, 19 nt, synthetic construct
  source 1..19: mol_type = other RNA
aggctattcggaaactcag

SEQ ID NO: 377 - RNA, 19 nt, synthetic construct
  source 1..19: mol_type = other RNA
aggctattcggaaactcat

SEQ ID NO: 378 - RNA, 19 nt, synthetic construct
  source 1..19: mol_type = other RNA
aggctattcggaaactcaa

SEQ ID NO: 379 - RNA, 19 nt, synthetic construct
  source 1..19: mol_type = other RNA
aggctattcggaaactcan

SEQ ID NO: 380 - RNA, 19 nt, synthetic construct
  source 1..19: mol_type = other RNA
nggctattcggaaactcan

SEQ ID NO: 381 - RNA, 19 nt, synthetic construct
  source 1..19: mol_type = other RNA
tattcggaaactcagataa

SEQ ID NO: 382 - RNA, 19 nt, synthetic construct
  source 1..19: mol_type = other RNA
tattcggaaactcagatat

SEQ ID NO: 383 - RNA, 19 nt, synthetic construct
  source 1..19: mol_type = other RNA
tattcggaaactcagatan

SEQ ID NO: 384 - RNA, 19 nt, synthetic construct
  source 1..19: mol_type = other RNA
nattcggaaactcagatan

SEQ ID NO: 385 - RNA, 19 nt, synthetic construct
  source 1..19: mol_type = other RNA
attcggaaactcagataaa

SEQ ID NO: 386 - RNA, 19 nt, synthetic construct
  source 1..19: mol_type = other RNA
attcggaaactcagataat

SEQ ID NO: 387 - RNA, 19 nt, synthetic construct
  source 1..19: mol_type = other RNA
attcggaaactcagataan

SEQ ID NO: 388 - RNA, 19 nt, synthetic construct
  source 1..19: mol_type = other RNA
nttcggaaactcagataan

SEQ ID NO: 389 - RNA, 19 nt, synthetic construct
  source 1..19: mol_type = other RNA
ttcggaaactcagataaat

SEQ ID NO: 390 - RNA, 19 nt, synthetic construct
  source 1..19: mol_type = other RNA
ttcggaaactcagataaan

SEQ ID NO: 391 - RNA, 19 nt, synthetic construct
  source 1..19: mol_type = other RNA
ntcggaaactcagataaat

SEQ ID NO: 392 - RNA, 19 nt, synthetic construct
  source 1..19: mol_type = other RNA
ntcggaaactcagataaan

SEQ ID NO: 393 - RNA, 19 nt, synthetic construct
  modified_base 18: mod_base = OTHER; note = 2-aminoadenosine nucleotide
  source 1..19: mol_type = other RNA
ttcggaaactcagataant

SEQ ID NO: 394 - RNA, 19 nt, synthetic construct
  modified_base 18: mod_base = OTHER; note = 2-aminoadenosine nucleotide
  source 1..19: mol_type = other RNA
ttcggaaactcagataann

SEQ ID NO: 395 - RNA, 19 nt, synthetic construct
  modified_base 18: mod_base = OTHER; note = 2-aminoadenosine nucleotide
  source 1..19: mol_type = other RNA
ntcggaaactcagataant

SEQ ID NO: 396 - RNA, 19 nt, synthetic construct
  modified_base 18: mod_base = OTHER; note = 2-aminoadenosine nucleotide
  source 1..19: mol_type = other RNA
ntcggaaactcagataann

SEQ ID NO: 397 - RNA, 19 nt, synthetic construct
  source 1..19: mol_type = other RNA
tcggaaactcagataaatg

SEQ ID NO: 398 - RNA, 19 nt, synthetic construct
  source 1..19: mol_type = other RNA
tcggaaactcagataaata

SEQ ID NO: 399 - RNA, 19 nt, synthetic construct
  source 1..19: mol_type = other RNA
tcggaaactcagataaatt

SEQ ID NO: 400 - RNA, 19 nt, synthetic construct
  source 1..19: mol_type = other RNA
tcggaaactcagataaatn

SEQ ID NO: 401 - RNA, 19 nt, synthetic construct
  source 1..19: mol_type = other RNA
ncggaaactcagataaatn

SEQ ID NO: 402 - RNA, 19 nt, synthetic construct
  source 1..19: mol_type = other RNA
aaactcagataaatgctaa

SEQ ID NO: 403 - RNA, 19 nt, synthetic construct
  source 1..19: mol_type = other RNA
aaactcagataaatgctan

SEQ ID NO: 404 - RNA, 19 nt, synthetic construct
  source 1..19: mol_type = other RNA
gaactcagataaatgctaa

SEQ ID NO: 405 - RNA, 19 nt, synthetic construct
  modified_base 2: mod_base = OTHER; note = 2-aminoadenosine nucleotide
  source 1..19: mol_type = other RNA
gnactcagataaatgctaa

SEQ ID NO: 406 - RNA, 19 nt, synthetic construct
  source 1..19: mol_type = other RNA
naactcagataaatgctaa

SEQ ID NO: 407 - RNA, 19 nt, synthetic construct
  source 1..19: mol_type = other RNA
naactcagataaatgctan

SEQ ID NO: 408 - RNA, 19 nt, synthetic construct
  modified_base 2: mod_base = OTHER; note = 2-aminoadenosine nucleotide
  source 1..19: mol_type = other RNA
nnactcagataaatgctaa

SEQ ID NO: 409 - RNA, 19 nt, synthetic construct
  modified_base 2: mod_base = OTHER; note = 2-aminoadenosine nucleotide
  source 1..19: mol_type = other RNA
nnactcagataaatgctan

SEQ ID NO: 410 - RNA, 19 nt, synthetic construct
  source 1..19: mol_type = other RNA
gctactcaggcaatgaaga

SEQ ID NO: 411 - RNA, 19 nt, synthetic construct
  source 1..19: mol_type = other RNA
gctactcaggcaatgaagt

SEQ ID NO: 412 - RNA, 19 nt, synthetic construct
  source 1..19: mol_type = other RNA
gctactcaggcaatgaagn

SEQ ID NO: 413 - RNA, 19 nt, synthetic construct
  source 1..19: mol_type = other RNA
nctactcaggcaatgaagn

SEQ ID NO: 414 - RNA, 19 nt, synthetic construct
  source 1..19: mol_type = other RNA
ctactcaggcaatgaagaa

SEQ ID NO: 415 - RNA, 19 nt, synthetic construct
  source 1..19: mol_type = other RNA
ctactcaggcaatgaagat

SEQ ID NO: 416 - RNA, 19 nt, synthetic construct
  source 1..19: mol_type = other RNA
ctactcaggcaatgaagan

SEQ ID NO: 417 - RNA, 19 nt, synthetic construct
  source 1..19: mol_type = other RNA
ntactcaggcaatgaagan

SEQ ID NO: 418 - RNA, 19 nt, synthetic construct
  source 1..19: mol_type = other RNA
ctactcaggcaatgaagaa

SEQ ID NO: 419 - DNA, 19 bp, synthetic construct
  source 1..19: mol_type = other DNA
gaagaggagaaaaaggaaa

SEQ ID NO: 420 - RNA, 19 nt, synthetic construct
  source 1..19: mol_type = other RNA
aggagaaaaaggaaagtca

SEQ ID NO: 421 - RNA, 19 nt, synthetic construct
  source 1..19: mol_type = other RNA
aggagaaaaaggaaagtcn

SEQ ID NO: 422 - RNA, 19 nt, synthetic construct
  source 1..19: mol_type = other RNA
aggagaaaaaggaaagtcn

SEQ ID NO: 423 - RNA, 19 nt, synthetic construct
  source 1..19: mol_type = other RNA
nggagaaaaaggaaagtcn

SEQ ID NO: 424 - RNA, 19 nt, synthetic construct
  source 1..19: mol_type = other RNA
ggagaaaaaggaaagtcac

SEQ ID NO: 425 - RNA, 19 nt, synthetic construct
  source 1..19: mol_type = other RNA
aaaaaggaaagtcacaacc

SEQ ID NO: 426 - RNA, 19 nt, synthetic construct
  source 1..19: mol_type = other RNA
aaaaaggaaagtcacaact

SEQ ID NO: 427 - RNA, 19 nt, synthetic construct
  source 1..19: mol_type = other RNA
aaaaaggaaagtcacaaca

SEQ ID NO: 428 - RNA, 19 nt, synthetic construct
  source 1..19: mol_type = other RNA
aaaaaggaaagtcacaacn

SEQ ID NO: 429 - RNA, 19 nt, synthetic construct
  source 1..19: mol_type = other RNA
naaaaggaaagtcacaacn

SEQ ID NO: 430 - RNA, 19 nt, synthetic construct
  source 1..19: mol_type = other RNA
aaaggaaagtcacaaccaa

SEQ ID NO: 431 - RNA, 19 nt, synthetic construct
  source 1..19: mol_type = other RNA
aaaggaaagtcacaaccat

SEQ ID NO: 432 - RNA, 19 nt, synthetic construct
  source 1..19: mol_type = other RNA
aaaggaaagtcacaaccan

SEQ ID NO: 433 - RNA, 19 nt, synthetic construct
  source 1..19: mol_type = other RNA
naaggaaagtcacaaccan

SEQ ID NO: 434 - RNA, 19 nt, synthetic construct
  source 1..19: mol_type = other RNA
aggaaagtcacaaccaata

SEQ ID NO: 435 - RNA, 19 nt, synthetic construct
  source 1..19: mol_type = other RNA
aggaaagtcacaaccaatt

SEQ ID NO: 436 - RNA, 19 nt, synthetic construct
  source 1..19: mol_type = other RNA
aggaaagtcacaaccaatn

SEQ ID NO: 437 - RNA, 19 nt, synthetic construct
  source 1..19: mol_type = other RNA
nggaaagtcacaaccaatn

SEQ ID NO: 438 - RNA, 19 nt, synthetic construct
  source 1..19: mol_type = other RNA
gaaagtcacaaccaataaa

SEQ ID NO: 439 - RNA, 19 nt, synthetic construct
  source 1..19: mol_type = other RNA
gaaagtcacaaccaataat

SEQ ID NO: 440 - RNA, 19 nt, synthetic construct
  source 1..19: mol_type = other RNA
gaaagtcacaaccaataan

SEQ ID NO: 441 - RNA, 19 nt, synthetic construct
  source 1..19: mol_type = other RNA
naaagtcacaaccaataan

SEQ ID NO: 442 - RNA, 19 nt, synthetic construct
  source 1..19: mol_type = other RNA
aaagtcacaaccaataaat

SEQ ID NO: 443 - RNA, 19 nt, synthetic construct
  source 1..19: mol_type = other RNA
aaagtcacaaccaataaaa

SEQ ID NO: 444 - RNA, 19 nt, synthetic construct
  source 1..19: mol_type = other RNA
aaagtcacaaccaataaan

SEQ ID NO: 445 - RNA, 19 nt, synthetic construct
  source 1..19: mol_type = other RNA
naagtcacaaccaataaan

SEQ ID NO: 446 - RNA, 19 nt, synthetic construct
  source 1..19: mol_type = other RNA
aagtcacaaccaataaatg

SEQ ID NO: 447 - RNA, 19 nt, synthetic construct
  source 1..19: mol_type = other RNA
aagtcacaaccaataaata

SEQ ID NO: 448 - RNA, 19 nt, synthetic construct
  source 1..19: mol_type = other RNA
aagtcacaaccaataaatn

SEQ ID NO: 449 - RNA, 19 nt, synthetic construct
  source 1..19: mol_type = other RNA
nagtcacaaccaataaata

SEQ ID NO: 450 - RNA, 19 nt, synthetic construct
  source 1..19: mol_type = other RNA
nagtcacaaccaataaatn

SEQ ID NO: 451 - RNA, 19 nt, synthetic construct
  modified_base 17: mod_base = OTHER; note = 2-aminoadenosine nucleotide
  source 1..19: mol_type = other RNA
aagtcacaaccaataantg

SEQ ID NO: 452 - RNA, 19 nt, synthetic construct
  modified_base 17: mod_base = OTHER; note = 2-aminoadenosine nucleotide
  source 1..19: mol_type = other RNA
aagtcacaaccaataanta

SEQ ID NO: 453 - RNA, 19 nt, synthetic construct
  modified_base 17: mod_base = OTHER; note = 2-aminoadenosine nucleotide
  source 1..19: mol_type = other RNA
aagtcacaaccaataantn

SEQ ID NO: 454 - RNA, 19 nt, synthetic construct
  modified_base 17: mod_base = OTHER; note = 2-aminoadenosine nucleotide
  source 1..19: mol_type = other RNA
nagtcacaaccaataanta

SEQ ID NO: 455 - RNA, 19 nt, synthetic construct
  modified_base 17: mod_base = OTHER; note = 2-aminoadenosine nucleotide
  source 1..19: mol_type = other RNA
nagtcacaaccaataantn

SEQ ID NO: 456 - RNA, 19 nt, synthetic construct
  source 1..19: mol_type = other RNA
gtcacaaccaataaatgtc

SEQ ID NO: 457 - RNA, 19 nt, synthetic construct
  source 1..19: mol_type = other RNA
gtcacaaccaataaatgta

SEQ ID NO: 458 - RNA, 19 nt, synthetic construct
  source 1..19: mol_type = other RNA
gtcacaaccaataaatgtn

SEQ ID NO: 459 - RNA, 19 nt, synthetic construct
  source 1..19: mol_type = other RNA
ntcacaaccaataaatgta

SEQ ID NO: 460 - RNA, 19 nt, synthetic construct
  source 1..19: mol_type = other RNA
ntcacaaccaataaatgtn

SEQ ID NO: 461 - RNA, 19 nt, synthetic construct
  source 1..19: mol_type = other RNA
tcacaaccaataaatgtct

SEQ ID NO: 462 - RNA, 19 nt, synthetic construct
  source 1..19: mol_type = other RNA
tcacaaccaataaatgtca

SEQ ID NO: 463 - RNA, 19 nt, synthetic construct
  source 1..19: mol_type = other RNA
tcacaaccaataaatgtcn

SEQ ID NO: 464 - RNA, 19 nt, synthetic construct
  source 1..19: mol_type = other RNA
ncacaaccaataaatgtca

SEQ ID NO: 465 - RNA, 19 nt, synthetic construct
  source 1..19: mol_type = other RNA
ncacaaccaataaatgtct

SEQ ID NO: 466 - RNA, 19 nt, synthetic construct
  source 1..19: mol_type = other RNA
ncacaaccaataaatgtcn

SEQ ID NO: 467 - RNA, 19 nt, synthetic construct
  source 1..19: mol_type = other RNA
tcacaaccaataaatgtct

SEQ ID NO: 468 - RNA, 19 nt, synthetic construct
  source 1..19: mol_type = other RNA
tcacaaccaataaatgtca

SEQ ID NO: 469 - RNA, 19 nt, synthetic construct
  source 1..19: mol_type = other RNA
tcacaaccaataaatgtcn

SEQ ID NO: 470 - RNA, 19 nt, synthetic construct
  source 1..19: mol_type = other RNA
ncacaaccaataaatgtca

SEQ ID NO: 471 - RNA, 19 nt, synthetic construct
  source 1..19: mol_type = other RNA
ncacaaccaataaatgtcn

SEQ ID NO: 472 - RNA, 19 nt, synthetic construct
  source 1..19: mol_type = other RNA
tcacaaccaataaacgtct

SEQ ID NO: 473 - RNA, 19 nt, synthetic construct
  source 1..19: mol_type = other RNA
tcacaaccaataaacgtca

SEQ ID NO: 474 - RNA, 19 nt, synthetic construct
  source 1..19: mol_type = other RNA
ncacaaccaataaacgtct

SEQ ID NO: 475 - RNA, 19 nt, synthetic construct
  source 1..19: mol_type = other RNA
tcacaaccaataaacgtcn

SEQ ID NO: 476 - RNA, 19 nt, synthetic construct
  source 1..19: mol_type = other RNA
ncacaaccaataaacgtcn

SEQ ID NO: 477 - RNA, 19 nt, synthetic construct
  source 1..19: mol_type = other RNA
aatgtctggaacaagtgtc

SEQ ID NO: 478 - RNA, 19 nt, synthetic construct
  source 1..19: mol_type = other RNA
aatgtctggaacaagtgta

SEQ ID NO: 479 - RNA, 19 nt, synthetic construct
  source 1..19: mol_type = other RNA
aatgtctggaacaagtgtt

SEQ ID NO: 480 - RNA, 19 nt, synthetic construct
  source 1..19: mol_type = other RNA
aatgtctggaacaagtgtn

SEQ ID NO: 481 - RNA, 19 nt, synthetic construct
  source 1..19: mol_type = other RNA
natgtctggaacaagtgtn

SEQ ID NO: 482 - RNA, 19 nt, synthetic construct
  source 1..19: mol_type = other RNA
tgtctggaacaagtgtcac

SEQ ID NO: 483 - RNA, 19 nt, synthetic construct
  source 1..19: mol_type = other RNA
tgtctggaacaagtgtcaa

SEQ ID NO: 484 - RNA, 19 nt, synthetic construct
  source 1..19: mol_type = other RNA
tgtctggaacaagtgtcat

SEQ ID NO: 485 - RNA, 19 nt, synthetic construct
  source 1..19: mol_type = other RNA
tgtctggaacaagtgtcan

SEQ ID NO: 486 - RNA, 19 nt, synthetic construct
  source 1..19: mol_type = other RNA
ngtctggaacaagtgtcan

SEQ ID NO: 487 - RNA, 19 nt, synthetic construct
  source 1..19: mol_type = other RNA
tggaacaagtgtcacaatt

SEQ ID NO: 488 - RNA, 19 nt, synthetic construct
  source 1..19: mol_type = other RNA
tggaacaagtgtcacaata

SEQ ID NO: 489 - RNA, 19 nt, synthetic construct
  source 1..19: mol_type = other RNA
tggaacaagtgtcacaatn

SEQ ID NO: 490 - RNA, 19 nt, synthetic construct
  source 1..19: mol_type = other RNA
nggaacaagtgtcacaatn

SEQ ID NO: 491 - RNA, 19 nt, synthetic construct
  source 1..19: mol_type = other RNA
ggaacaagtgtcacaatta

SEQ ID NO: 492 - RNA, 19 nt, synthetic construct
  source 1..19: mol_type = other RNA
ggaacaagtgtcacaattt

SEQ ID NO: 493 - RNA, 19 nt, synthetic construct
  source 1..19: mol_type = other RNA
ggaacaagtgtcacaattn

SEQ ID NO: 494 - RNA, 19 nt, synthetic construct
  source 1..19: mol_type = other RNA
ngaacaagtgtcacaattn

SEQ ID NO: 495 - RNA, 19 nt, synthetic construct
  source 1..19: mol_type = other RNA
gaacaagtgtcacaattac

SEQ ID NO: 496 - RNA, 19 nt, synthetic construct
  source 1..19: mol_type = other RNA
gaacaagtgtcacaattaa

SEQ ID NO: 497 - RNA, 19 nt, synthetic construct
  source 1..19: mol_type = other RNA
gaacaagtgtcacaattat

SEQ ID NO: 498 - RNA, 19 nt, synthetic construct
  source 1..19: mol_type = other RNA
gaacaagtgtcacaattan

SEQ ID NO: 499 - RNA, 19 nt, synthetic construct
  source 1..19: mol_type = other RNA
naacaagtgtcacaattan

SEQ ID NO: 500 - RNA, 19 nt, synthetic construct
  source 1..19: mol_type = other RNA
aacaagtgtcacaattaca

SEQ ID NO: 501 - RNA, 19 nt, synthetic construct
  source 1..19: mol_type = other RNA
aacaagtgtcacaattact

SEQ ID NO: 502 - RNA, 19 nt, synthetic construct
  source 1..19: mol_type = other RNA
aacaagtgtcacaattacn

SEQ ID NO: 503 - RNA, 19 nt, synthetic construct
  source 1..19: mol_type = other RNA
nacaagtgtcacaattacn

SEQ ID NO: 504 - RNA, 19 nt, synthetic construct
  source 1..19: mol_type = other RNA
cttcaatcgacctttactg

SEQ ID NO: 505 - RNA, 19 nt, synthetic construct
  source 1..19: mol_type = other RNA
cttcaatcgacctttacta

SEQ ID NO: 506 - RNA, 19 nt, synthetic construct
  source 1..19: mol_type = other RNA
cttcaatcgacctttactt

SEQ ID NO: 507 - RNA, 19 nt, synthetic construct
  source 1..19: mol_type = other RNA
cttcaatcgacctttactn

SEQ ID NO: 508 - RNA, 19 nt, synthetic construct
  source 1..19: mol_type = other RNA
nttcaatcgacctttactn

SEQ ID NO: 509 - RNA, 19 nt, synthetic construct
  source 1..19: mol_type = other RNA
agtaaaccatctttattat

SEQ ID NO: 510 - RNA, 19 nt, synthetic construct
  source 1..19: mol_type = other RNA
agtaaaccatctttattaa

SEQ ID NO: 511 - RNA, 19 nt, synthetic construct
  source 1..19: mol_type = other RNA
agtaaaccatctttattan

SEQ ID NO: 512 - RNA, 19 nt, synthetic construct
  source 1..19: mol_type = other RNA
ngtaaaccatctttattan

SEQ ID NO: 513 - RNA, 19 nt, synthetic construct
  source 1..19: mol_type = other RNA
atatttcacagcaccaaaa

SEQ ID NO: 514 - RNA, 19 nt, synthetic construct
  source 1..19: mol_type = other RNA
atatttcacagcaccaaat

SEQ ID NO: 515 - RNA, 19 nt, synthetic construct
  source 1..19: mol_type = other RNA
atatttcacagcaccaaan

SEQ ID NO: 516 - RNA, 19 nt, synthetic construct
  source 1..19: mol_type = other RNA
ntatttcacagcaccaaan

SEQ ID NO: 517 - RNA, 19 nt, synthetic construct
  source 1..19: mol_type = other RNA
aacattaactctaactgtg

SEQ ID NO: 518 - RNA, 19 nt, synthetic construct
  source 1..19: mol_type = other RNA
aacattaactctaactgta

SEQ ID NO: 519 - RNA, 19 nt, synthetic construct
  source 1..19: mol_type = other RNA
aacattaactctaactgtt

SEQ ID NO: 520 - RNA, 19 nt, synthetic construct
  source 1..19: mol_type = other RNA
aacattaactctaactgtn

SEQ ID NO: 521 - RNA, 19 nt, synthetic construct
  source 1..19: mol_type = other RNA
nacattaactctaactgtn

SEQ ID NO: 522 - RNA, 19 nt, synthetic construct
  source 1..19: mol_type = other RNA
agaagagtttcttaactta

SEQ ID NO: 523 - RNA, 19 nt, synthetic construct
  source 1..19: mol_type = other RNA
agaagagtttcttaacttt

SEQ ID NO: 524 - RNA, 19 nt, synthetic construct
  source 1..19: mol_type = other RNA
agaagagtttcttaacttn

SEQ ID NO: 525 - RNA, 19 nt, synthetic construct
  source 1..19: mol_type = other RNA
ngaagagtttcttaacttn

SEQ ID NO: 526 - RNA, 19 nt, synthetic construct
  source 1..19: mol_type = other RNA
aagagtttcttaacttact

SEQ ID NO: 527 - RNA, 19 nt, synthetic construct
  source 1..19: mol_type = other RNA
aagagtttcttaacttaca

SEQ ID NO: 528 - RNA, 19 nt, synthetic construct
  source 1..19: mol_type = other RNA
aagagtttcttaacttact

SEQ ID NO: 529 - RNA, 19 nt, synthetic construct
  source 1..19: mol_type = other RNA
nagagtttcttaacttacn

SEQ ID NO: 530 - RNA, 19 nt, synthetic construct
  source 1..19: mol_type = other RNA
actactcctcaaatgttga

SEQ ID NO: 531 - RNA, 19 nt, synthetic construct
  source 1..19: mol_type = other RNA
actactcctcaaatgttgt

SEQ ID NO: 532 - RNA, 19 nt, synthetic construct
  source 1..19: mol_type = other RNA
actactcctcaaatgttgn

SEQ ID NO: 533 - RNA, 19 nt, synthetic construct
  source 1..19: mol_type = other RNA
nctactcctcaaatgttgn

SEQ ID NO: 534 - RNA, 19 nt, synthetic construct
  source 1..19: mol_type = other RNA
tccataacattgatgactg

SEQ ID NO: 535 - RNA, 19 nt, synthetic construct
  source 1..19: mol_type = other RNA
tccataacattgatgacta

SEQ ID NO: 536 - RNA, 19 nt, synthetic construct
  source 1..19: mol_type = other RNA
tccataacattgatgactt

SEQ ID NO: 537 - RNA, 19 nt, synthetic construct
  source 1..19: mol_type = other RNA
tccataacattgatgactn

SEQ ID NO: 538 - RNA, 19 nt, synthetic construct
  source 1..19: mol_type = other RNA
nccataacattgatgactn

SEQ ID NO: 539 - RNA, 19 nt, synthetic construct
  source 1..19: mol_type = other RNA
attgatgactggcttcatg

SEQ ID NO: 540 - RNA, 19 nt, synthetic construct
  source 1..19: mol_type = other RNA
attgatgactggcttcata

SEQ ID NO: 541 - RNA, 19 nt, synthetic construct
  source 1..19: mol_type = other RNA
attgatgactggcttcatt

SEQ ID NO: 542 - RNA, 19 nt, synthetic construct
  source 1..19: mol_type = other RNA
attgatgactggcttcatn

SEQ ID NO: 543 - RNA, 19 nt, synthetic construct
  source 1..19: mol_type = other RNA
nttgatgactggcttcatn

SEQ ID NO: 544 - RNA, 19 nt, synthetic construct
  source 1..19: mol_type = other RNA
aatgatagcacctaaactt

SEQ ID NO: 545 - RNA, 19 nt, synthetic construct
  source 1..19: mol_type = other RNA
aatgatagcacctaaacta

SEQ ID NO: 546 - RNA, 19 nt, synthetic construct
  source 1..19: mol_type = other RNA
aatgatagcacctaaactn

SEQ ID NO: 547 - RNA, 19 nt, synthetic construct
  source 1..19: mol_type = other RNA
natgatagcacctaaactn

SEQ ID NO: 548 - RNA, 19 nt, synthetic construct
  source 1..19: mol_type = other RNA
gacagacattccttctaca

SEQ ID NO: 549 - RNA, 19 nt, synthetic construct
  source 1..19: mol_type = other RNA
gacagacattccttctact

SEQ ID NO: 550 - RNA, 19 nt, synthetic construct
  source 1..19: mol_type = other RNA
gacagacattccttctacn

SEQ ID NO: 551 - RNA, 19 nt, synthetic construct
  source 1..19: mol_type = other RNA
nacagacattccttctacn

SEQ ID NO: 552 - RNA, 19 nt, synthetic construct
  source 1..19: mol_type = other RNA
gacattccttctacatgta

SEQ ID NO: 553 - RNA, 19 nt, synthetic construct
  source 1..19: mol_type = other RNA
gacattccttctacatgtt

SEQ ID NO: 554 - RNA, 19 nt, synthetic construct
  source 1..19: mol_type = other RNA
gacattccttctacatgtn

SEQ ID NO: 555 - RNA, 19 nt, synthetic construct
  source 1..19: mol_type = other RNA
nacattccttctacatgtn

SEQ ID NO: 556 - RNA, 19 nt, synthetic construct
  source 1..19: mol_type = other RNA
catgtaatgacacttcttg

SEQ ID NO: 557 - RNA, 19 nt, synthetic construct
  source 1..19: mol_type = other RNA
catgtaatgacacttctta

SEQ ID NO: 558 - RNA, 19 nt, synthetic construct
  source 1..19: mol_type = other RNA
catgtaatgacacttcttt

SEQ ID NO: 559 - RNA, 19 nt, synthetic construct
  source 1..19: mol_type = other RNA
catgtaatgacacttcttn

SEQ ID NO: 560 - RNA, 19 nt, synthetic construct
  source 1..19: mol_type = other RNA
natgtaatgacacttcttn

SEQ ID NO: 561 - RNA, 19 nt, synthetic construct
  source 1..19: mol_type = other RNA
atgtaatgacacttcttgt

SEQ ID NO: 562 - RNA, 19 nt, synthetic construct
  source 1..19: mol_type = other RNA
atgtaatgacacttcttga

SEQ ID NO: 563 - RNA, 19 nt, synthetic construct
  source 1..19: mol_type = other RNA
atgtaatgacacttcttgn

SEQ ID NO: 564 - RNA, 19 nt, synthetic construct
  source 1..19: mol_type = other RNA
ntgtaatgacacttcttgn

SEQ ID NO: 565 - RNA, 19 nt, synthetic construct
  source 1..19: mol_type = other RNA
tgtaatgacacttcttgtg

SEQ ID NO: 566 - RNA, 19 nt, synthetic construct
  source 1..19: mol_type = other RNA
tgtaatgacacttcttgta

SEQ ID NO: 567 - RNA, 19 nt, synthetic construct
  source 1..19: mol_type = other RNA
tgtaatgacacttcttgtt

SEQ ID NO: 568 - RNA, 19 nt, synthetic construct
  source 1..19: mol_type = other RNA
tgtaatgacacttcttgtn

SEQ ID NO: 569 - RNA, 19 nt, synthetic construct
  source 1..19: mol_type = other RNA
ngtaatgacacttcttgtn

SEQ ID NO: 570 - RNA, 19 nt, synthetic construct
  source 1..19: mol_type = other RNA
caagcaaagtattgtgaaa

SEQ ID NO: 571 - RNA, 19 nt, synthetic construct
  source 1..19: mol_type = other RNA
caagcaaagtattgtgaat

SEQ ID NO: 572 - RNA, 19 nt, synthetic construct
  source 1..19: mol_type = other RNA
caagcaaagtattgtgaan

SEQ ID NO: 573 - RNA, 19 nt, synthetic construct
  source 1..19: mol_type = other RNA
naagcaaagtattgtgaan

SEQ ID NO: 574 - RNA, 19 nt, synthetic construct
  source 1..19: mol_type = other RNA
acaagtagatcctgagaag

SEQ ID NO: 575 - RNA, 19 nt, synthetic construct
  source 1..19: mol_type = other RNA
acaagtagatcctgagaag

SEQ ID NO: 576 - RNA, 19 nt, synthetic construct
  source 1..19: mol_type = other RNA
acaagtagatcctgagaat

SEQ ID NO: 577 - RNA, 19 nt, synthetic construct
  source 1..19: mol_type = other RNA
acaagtagatcctgagaan

SEQ ID NO: 578 - RNA, 19 nt, synthetic construct
  source 1..19: mol_type = other RNA
ncaagtagatcctgagaan

SEQ ID NO: 579 - RNA, 19 nt, synthetic construct
  source 1..19: mol_type = other RNA
tacctttgttacagctact

SEQ ID NO: 580 - RNA, 19 nt, synthetic construct
  source 1..19: mol_type = other RNA
tacctttgttacagctaca

SEQ ID NO: 581 - RNA, 19 nt, synthetic construct
  source 1..19: mol_type = other RNA
tacctttgttacagctacn

SEQ ID NO: 582 - RNA, 19 nt, synthetic construct
  source 1..19: mol_type = other RNA
nacctttgttacagctacn

SEQ ID NO: 583 - RNA, 19 nt, synthetic construct
  source 1..19: mol_type = other RNA
cctttgtaattgacactat

SEQ ID NO: 584 - RNA, 19 nt, synthetic construct
  source 1..19: mol_type = other RNA
cctttgtaattgacactaa

SEQ ID NO: 585 - RNA, 19 nt, synthetic construct
  source 1..19: mol_type = other RNA
cctttgtaattgacactan

SEQ ID NO: 586 - RNA, 19 nt, synthetic construct
  source 1..19: mol_type = other RNA
nctttgtaattgacactan

SEQ ID NO: 587 - RNA, 21 nt, synthetic construct
  modified_base 1: mod_base = OTHER; note = 5'-cyclopropyl phosphonate-2'-O-methyladenosine
  modified_base 1^2: mod_base = OTHER; note = phosphorothioate linkage
  modified_base 2: mod_base = OTHER; note = 2'-fluoroguanosine
  modified_base 2^3: mod_base = OTHER; note = phosphorothioate linkage
  modified_base 3: mod_base = OTHER; note = 2'-O-methyladenosine
  modified_base 3^4: mod_base = OTHER; note = phosphorothioate linkage
  modified_base 4: mod_base = OTHER; note = 2'-fluoroadenosine
  modified_base 5: mod_base = um
  modified_base 6: mod_base = OTHER; note = 2'-fluorouridine
  modified_base 7: mod_base = um
  modified_base 8: mod_base = OTHER; note = 2'-fluoroguanosine
  modified_base 9: mod_base = um
  modified_base 10: mod_base = OTHER; note = 2'-fluoroguanosine
  modified_base 11: mod_base = OTHER; note = 2'-O-methyladenosine
  modified_base 12: mod_base = OTHER; note = 2'-fluoroguanosine
  modified_base 13: mod_base = gm
  modified_base 14: mod_base = OTHER; note = 2'-fluorouridine
  modified_base 15: mod_base = um
  modified_base 16: mod_base = OTHER; note = 2'-fluorouridine
  modified_base 17: mod_base = gm
  modified_base 18: mod_base = OTHER; note = 2'-fluoroadenosine
  modified_base 19: mod_base = um
  modified_base 20: mod_base = OTHER; note = 2'-fluorouridine
  modified_base 20^21: mod_base = OTHER; note = phosphorothioate linkage
  modified_base 21: mod_base = cm
  source 1..21: mol_type = other RNA
agaatttgtgaggtttgattc

SEQ ID NO: 588 - RNA, 21 nt, synthetic construct
  modified_base 1: mod_base = OTHER; note = 5'-cyclopropyl phosphonate-2'-O-methyluridine
  modified_base 1^2: mod_base = OTHER; note = phosphorothioate linkage
  modified_base 2: mod_base = OTHER; note = 2'-fluoroadenosine
  modified_base 2^3: mod_base = OTHER; note = phosphorothioate linkage
  modified_base 3: mod_base = cm
  modified_base 3^4: mod_base = OTHER; note = phosphorothioate linkage
  modified_base 4: mod_base = OTHER; note = 2'-fluorocytidine
  modified_base 5: mod_base = OTHER; note = 2'-O-methyladenosine
  modified_base 6: mod_base = OTHER; note = 2'-fluorouridine
  modified_base 7: mod_base = um
  modified_base 8: mod_base = um
  modified_base 9: mod_base = cm
  modified_base 10: mod_base = um
  modified_base 11: mod_base = cm
  modified_base 12: mod_base = OTHER; note = 2'-fluorouridine
  modified_base 13: mod_base = cm
  modified_base 14: mod_base = OTHER; note = 2'-fluoroadenosine
  modified_base 15: mod_base = gm
  modified_base 16: mod_base = OTHER; note = 2'-fluorouridine
  modified_base 17: mod_base = um
  modified_base 18: mod_base = OTHER; note = 2'-fluorouridine
  modified_base 19: mod_base = cm
  modified_base 20: mod_base = OTHER; note = 2'-O-methyladenosine
  modified_base 20^21: mod_base = OTHER; note = phosphorothioate linkage
  modified_base 21: mod_base = gm
  source 1..21: mol_type = other RNA
taccatttctctcagtttcag

SEQ ID NO: 589 - RNA, 21 nt, synthetic construct
  modified_base 1: mod_base = um
  modified_base 1^2: mod_base = OTHER; note = phosphorothioate linkage
  modified_base 2: mod_base = OTHER; note = 2'-fluorouridine
  modified_base 2^3: mod_base = OTHER; note = phosphorothioate linkage
  modified_base 3: mod_base = OTHER; note = 2'-O-methyladenosine
  modified_base 3^4: mod_base = OTHER; note = phosphorothioate linkage
  modified_base 4: mod_base = OTHER; note = 2'-fluoroguanosine
  modified_base 5: mod_base = cm
  modified_base 6: mod_base = OTHER; note = 2'-fluoroadenosine
  modified_base 7: mod_base = um
  modified_base 8: mod_base = OTHER; note = 2'-fluorouridine
  modified_base 9: mod_base = um
  modified_base 10: mod_base = OTHER; note = 2'-fluoroadenosine
  modified_base 11: mod_base = um
  modified_base 12: mod_base = OTHER; note = 2'-fluorocytidine
  modified_base 13: mod_base = um
  modified_base 14: mod_base = OTHER; note = 2'-fluoroguanosine
  modified_base 15: mod_base = OTHER; note = 2'-O-methyladenosine
  modified_base 16: mod_base = OTHER; note = 2'-fluoroguanosine
  modified_base 17: mod_base = um
  modified_base 18: mod_base = OTHER; note = 2'-fluorouridine
  modified_base 19: mod_base = um
  modified_base 20: mod_base = OTHER; note = 2'-fluorocytidine
  modified_base 20^21: mod_base = OTHER; note = phosphorothioate linkage
  modified_base 21: mod_base = cm
  source 1..21: mol_type = other RNA
ttagcatttatctgagtttcc

SEQ ID NO: 590 - RNA, 21 nt, synthetic construct
  modified_base 1: mod_base = um
  modified_base 1^2: mod_base = OTHER; note = phosphorothioate linkage
  modified_base 2: mod_base = OTHER; note = 2'-fluoroadenosine
  modified_base 2^3: mod_base = OTHER; note = phosphorothioate linkage
  modified_base 3: mod_base = cm
  modified_base 3^4: mod_base = OTHER; note = phosphorothioate linkage
  modified_base 4: mod_base = OTHER; note = 2'-fluoroadenosine
  modified_base 5: mod_base = um
  modified_base 6: mod_base = OTHER; note = 2'-fluorouridine
  modified_base 7: mod_base = um
  modified_base 8: mod_base = OTHER; note = 2'-fluoroadenosine
  modified_base 9: mod_base = um
  modified_base 10: mod_base = OTHER; note = 2'-fluorouridine
  modified_base 11: mod_base = gm
  modified_base 12: mod_base = OTHER; note = 2'-fluoroguanosine
  modified_base 13: mod_base = um
  modified_base 14: mod_base = OTHER; note = 2'-fluorouridine
  modified_base 15: mod_base = gm
  modified_base 16: mod_base = OTHER; note = 2'-fluorouridine
  modified_base 17: mod_base = gm
  modified_base 18: mod_base = OTHER; note = 2'-fluoroadenosine
  modified_base 19: mod_base = cm
  modified_base 20: mod_base = OTHER; note = 2'-fluorouridine
  modified_base 20^21: mod_base = OTHER; note = phosphorothioate linkage
  modified_base 21: mod_base = um
  source 1..21: mol_type = other RNA
tacatttattggttgtgactt

SEQ ID NO: 591 - RNA, 21 nt, synthetic construct
  modified_base 1: mod_base = OTHER; note = 5'-cyclopropyl phosphonate-2'-O-methyluridine
  modified_base 1^2: mod_base = OTHER; note = phosphorothioate linkage
  modified_base 2: mod_base = OTHER; note = 2'-fluorouridine
  modified_base 2^3: mod_base = OTHER; note = phosphorothioate linkage
  modified_base 3: mod_base = gm
  modified_base 3^4: mod_base = OTHER; note = phosphorothioate linkage
  modified_base 4: mod_base = OTHER; note = 2'-fluoroguanosine
  modified_base 5: mod_base = OTHER; note = 2'-O-methyladenosine
  modified_base 6: mod_base = OTHER; note = 2'-fluorouridine
  modified_base 7: mod_base = um
  modified_base 8: mod_base = OTHER; note = 2'-fluorouridine
  modified_base 9: mod_base = cm
  modified_base 10: mod_base = OTHER; note = 2'-fluoroadenosine
  modified_base 11: mod_base = gm
  modified_base 12: mod_base = OTHER; note = 2'-fluorouridine
  modified_base 13: mod_base = OTHER; note = 2'-O-methyladenosine
  modified_base 14: mod_base = OTHER; note = 2'-fluoroadenosine
  modified_base 15: mod_base = gm
  modified_base 16: mod_base = OTHER; note = 2'-fluoroguanosine
  modified_base 17: mod_base = cm
  modified_base 18: mod_base = OTHER; note = 2'-fluoroadenosine
  modified_base 19: mod_base = OTHER; note = 2'-O-methyladenosine
  modified_base 20: mod_base = OTHER; note = 2'-fluorouridine
  modified_base 20^21: mod_base = OTHER; note = phosphorothioate linkage
  modified_base 21: mod_base = gm
  source 1..21: mol_type = other RNA
ttggatttcagtaaggcaatg

SEQ ID NO: 592 - RNA, 21 nt, synthetic construct
  modified_base 1: mod_base = OTHER; note = 5'-cyclopropyl phosphonate-2'-O-methyluridine
  modified_base 1^2: mod_base = OTHER; note = phosphorothioate linkage
  modified_base 2: mod_base = OTHER; note = 2'-fluoroadenosine
  modified_base 2^3: mod_base = OTHER; note = phosphorothioate linkage
  modified_base 3: mod_base = OTHER; note = 2'-O-methyladenosine
  modified_base 3^4: mod_base = OTHER; note = phosphorothioate linkage
  modified_base 4: mod_base = OTHER; note = 2'-fluoroguanosine
  modified_base 5: mod_base = gm
  modified_base 6: mod_base = OTHER; note = 2'-fluorouridine
  modified_base 7: mod_base = um
  modified_base 8: mod_base = OTHER; note = 2'-fluoroadenosine
  modified_base 9: mod_base = gm
  modified_base 10: mod_base = OTHER; note = 2'-fluoroguanosine
  modified_base 11: mod_base = cm
  modified_base 12: mod_base = OTHER; note = 2'-fluorouridine
  modified_base 13: mod_base = cm
  modified_base 14: mod_base = OTHER; note = 2'-fluorouridine
  modified_base 15: mod_base = gm
  modified_base 16: mod_base = OTHER; note = 2'-fluoroguanosine
  modified_base 17: mod_base = OTHER; note = 2'-O-methyladenosine
  modified_base 18: mod_base = OTHER; note = 2'-fluorouridine
  modified_base 19: mod_base = um
  modified_base 20: mod_base = OTHER; note = 2'-fluorouridine
  modified_base 20^21: mod_base = OTHER; note = phosphorothioate linkage
  modified_base 21: mod_base = cm
  source 1..21: mol_type = other RNA
taaggttaggctctggatttc

SEQ ID NO: 593 - RNA, 21 nt, synthetic construct
  modified_base 1: mod_base = OTHER; note = 5'-cyclopropyl phosphonate-2'-O-methyladenosine
  modified_base 1^2: mod_base = OTHER; note = phosphorothioate linkage
  modified_base 2: mod_base = OTHER; note = 2'-fluorouridine
  modified_base 2^3: mod_base = OTHER; note = phosphorothioate linkage
  modified_base 3: mod_base = um
  modified_base 3^4: mod_base = OTHER; note = phosphorothioate linkage
  modified_base 4: mod_base = OTHER; note = 2'-fluorouridine
  modified_base 5: mod_base = OTHER; note = 2'-O-methyladenosine
  modified_base 6: mod_base = OTHER; note = 2'-fluorouridine
  modified_base 7: mod_base = cm
  modified_base 8: mod_base = OTHER; note = 2'-fluorouridine
  modified_base 9: mod_base = gm
  modified_base 10: mod_base = OTHER; note = 2'-fluoroadenosine
  modified_base 11: mod_base = gm
  modified_base 12: mod_base = OTHER; note = 2'-fluorouridine
  modified_base 13: mod_base = um
  modified_base 14: mod_base = OTHER; note = 2'-fluorouridine
  modified_base 15: mod_base = cm
  modified_base 16: mod_base = OTHER; note = 2'-fluorocytidine
  modified_base 17: mod_base = gm
  modified_base 18: mod_base = OTHER; note = 2'-fluoroadenosine
  modified_base 19: mod_base = OTHER; note = 2'-O-methyladenosine
  modified_base 20: mod_base = OTHER; note = 2'-fluorouridine
  modified_base 20^21: mod_base = OTHER; note = phosphorothioate linkage
  modified_base 21: mod_base = cm
  source 1..21: mol_type = other RNA
atttatctgagtttccgaatc

SEQ ID NO: 594 - RNA, 21 nt, synthetic construct
  modified_base 1: mod_base = OTHER; note = 5'-cyclopropyl phosphonate-2'-O-methyluridine
  modified_base 1^2: mod_base = OTHER; note = phosphorothioate linkage
  modified_base 2: mod_base = OTHER; note = 2'-fluoroadenosine
  modified_base 2^3: mod_base = OTHER; note = phosphorothioate linkage
  modified_base 3: mod_base = cm
  modified_base 3^4: mod_base = OTHER; note = phosphorothioate linkage
  modified_base 4: mod_base = OTHER; note = 2'-fluoroadenosine
  modified_base 5: mod_base = um
  modified_base 6: mod_base = OTHER; note = 2'-fluorouridine
  modified_base 7: mod_base = um
  modified_base 8: mod_base = OTHER; note = 2'-fluoroadenosine
  modified_base 9: mod_base = um
  modified_base 10: mod_base = OTHER; note = 2'-fluorouridine
  modified_base 11: mod_base = gm
  modified_base 12: mod_base = OTHER; note = 2'-fluoroguanosine
  modified_base 13: mod_base = um
  modified_base 14: mod_base = OTHER; note = 2'-fluorouridine
  modified_base 15: mod_base = gm
  modified_base 16: mod_base = OTHER; note = 2'-fluorouridine
  modified_base 17: mod_base = gm
  modified_base 18: mod_base = OTHER; note = 2'-fluoroadenosine
  modified_base 19: mod_base = cm
  modified_base 20: mod_base = OTHER; note = 2'-fluorouridine
  modified_base 20^21: mod_base = OTHER; note = phosphorothioate linkage
  modified_base 21: mod_base = um
  source 1..21: mol_type = other RNA
tacatttattggttgtgactt

SEQ ID NO: 595 - RNA, 21 nt, synthetic construct
  modified_base 1: mod_base = OTHER; note = 5'-cyclopropyl phosphonate-2'-O-methyladenosine
  modified_base 1^2: mod_base = OTHER; note = phosphorothioate linkage
  modified_base 2: mod_base = OTHER; note = 2'-fluoroguanosine
  modified_base 2^3: mod_base = OTHER; note = phosphorothioate linkage
  modified_base 3: mod_base = OTHER; note = 2'-O-methyladenosine
  modified_base 3^4: mod_base = OTHER; note = phosphorothioate linkage
  modified_base 4: mod_base = OTHER; note = 2'-fluorocytidine
  modified_base 5: mod_base = OTHER; note = 2'-O-methyladenosine
  modified_base 6: mod_base = OTHER; note = 2'-fluorouridine
  modified_base 7: mod_base = um
  modified_base 8: mod_base = OTHER; note = 2'-fluorouridine
  modified_base 9: mod_base = OTHER; note = 2'-O-methyladenosine
  modified_base 10: mod_base = OTHER; note = 2'-fluorouridine
  modified_base 11: mod_base = um
  modified_base 12: mod_base = OTHER; note = 2'-fluoroguanosine
  modified_base 13: mod_base = gm
  modified_base 14: mod_base = OTHER; note = 2'-fluorouridine
  modified_base 15: mod_base = um
  modified_base 16: mod_base = OTHER; note = 2'-fluoroguanosine
  modified_base 17: mod_base = um
  modified_base 18: mod_base = OTHER; note = 2'-fluoroguanosine
  modified_base 19: mod_base = OTHER; note = 2'-O-methyladenosine
  modified_base 20: mod_base = OTHER; note = 2'-fluorocytidine
  modified_base 20^21: mod_base = OTHER; note = phosphorothioate linkage
  modified_base 21: mod_base = um
  source 1..21: mol_type = other RNA
agacatttattggttgtgact

SEQ ID NO: 596 - RNA, 21 nt, synthetic construct
  modified_base 1: mod_base = OTHER; note = 5'-cyclopropyl phosphonate-2'-O-methyluridine
  modified_base 1^2: mod_base = OTHER; note = phosphorothioate linkage
  modified_base 2: mod_base = OTHER; note = 2'-fluoroadenosine
  modified_base 2^3: mod_base = OTHER; note = phosphorothioate linkage
  modified_base 3: mod_base = um
  modified_base 3^4: mod_base = OTHER; note = phosphorothioate linkage
  modified_base 4: mod_base = OTHER; note = 2'-fluorouridine
  modified_base 5: mod_base = um
  modified_base 6: mod_base = OTHER; note = 2'-fluoroadenosine
  modified_base 7: mod_base = um
  modified_base 8: mod_base = OTHER; note = 2'-fluorouridine
  modified_base 9: mod_base = gm
  modified_base 10: mod_base = OTHER; note = 2'-fluoroguanosine
  modified_base 11: mod_base = um
  modified_base 12: mod_base = OTHER; note = 2'-fluorouridine
  modified_base 13: mod_base = gm
  modified_base 14: mod_base = OTHER; note = 2'-fluorouridine
  modified_base 15: mod_base = gm
  modified_base 16: mod_base = OTHER; note = 2'-fluoroadenosine
  modified_base 17: mod_base = cm
  modified_base 18: mod_base = OTHER; note = 2'-fluorouridine
  modified_base 19: mod_base = um
  modified_base 20: mod_base = OTHER; note = 2'-fluorouridine
  modified_base 20^21: mod_base = OTHER; note = phosphorothioate linkage
  modified_base 21: mod_base = cm
  source 1..21: mol_type = other RNA
tatttattggttgtgactttc

SEQ ID NO: 597 - RNA, 21 nt, synthetic construct
  modified_base 1: mod_base = OTHER; note = 5'-cyclopropyl phosphonate-2'-O-methyluridine
  modified_base 1^2: mod_base = OTHER; note = phosphorothioate linkage
  modified_base 2: mod_base = OTHER; note = 2'-fluorouridine
  modified_base 2^3: mod_base = OTHER; note = phosphorothioate linkage
  modified_base 3: mod_base = OTHER; note = 2'-O-methyladenosine
  modified_base 3^4: mod_base = OTHER; note = phosphorothioate linkage
  modified_base 4: mod_base = OTHER; note = 2'-fluoroguanosine
  modified_base 5: mod_base = cm
  modified_base 6: mod_base = OTHER; note = 2'-fluoroadenosine
  modified_base 7: mod_base = um
  modified_base 8: mod_base = OTHER; note = 2'-fluorouridine
  modified_base 9: mod_base = um
  modified_base 10: mod_base = OTHER; note = 2'-fluoroadenosine
  modified_base 11: mod_base = um
  modified_base 12: mod_base = OTHER; note = 2'-fluorocytidine
  modified_base 13: mod_base = um
  modified_base 14: mod_base = OTHER; note = 2'-fluoroguanosine
  modified_base 15: mod_base = OTHER; note = 2'-O-methyladenosine
  modified_base 16: mod_base = OTHER; note = 2'-fluoroguanosine
  modified_base 17: mod_base = um
  modified_base 18: mod_base = OTHER; note = 2'-fluorouridine
  modified_base 19: mod_base = um
  modified_base 20: mod_base = OTHER; note = 2'-fluorocytidine
  modified_base 20^21: mod_base = OTHER; note = phosphorothioate linkage
  modified_base 21: mod_base = cm
  source 1..21: mol_type = other RNA
ttagcatttatctgagtttcc

SEQ ID NO: 598 - RNA, 21 nt, synthetic construct
  modified_base 1: mod_base = OTHER; note = 5'-cyclopropyl phosphonate-2'-O-methyladenosine
  modified_base 1^2: mod_base = OTHER; note = phosphorothioate linkage
  modified_base 2: mod_base = OTHER; note = 2'-fluorouridine
  modified_base 2^3: mod_base = OTHER; note = phosphorothioate linkage
  modified_base 3: mod_base = um
  modified_base 3^4: mod_base = OTHER; note = phosphorothioate linkage
  modified_base 4: mod_base = OTHER; note = 2'-fluoroguanosine
  modified_base 5: mod_base = OTHER; note = 2'-O-methyladenosine
  modified_base 6: mod_base = OTHER; note = 2'-fluoroadenosine
  modified_base 7: mod_base = gm
  modified_base 8: mod_base = OTHER; note = 2'-fluoroguanosine
  modified_base 9: mod_base = um
  modified_base 10: mod_base = OTHER; note = 2'-fluorouridine
  modified_base 11: mod_base = OTHER; note = 2'-O-methyladenosine
  modified_base 12: mod_base = OTHER; note = 2'-fluoroguanosine
  modified_base 13: mod_base = gm
  modified_base 14: mod_base = OTHER; note = 2'-fluorocytidine
  modified_base 15: mod_base = um
  modified_base 16: mod_base = OTHER; note = 2'-fluorocytidine
  modified_base 17: mod_base = um
  modified_base 18: mod_base = OTHER; note = 2'-fluoroguanosine
  modified_base 19: mod_base = gm
  modified_base 20: mod_base = OTHER; note = 2'-fluoroadenosine
  modified_base 20^21: mod_base = OTHER; note = phosphorothioate linkage
  modified_base 21: mod_base = um
  source 1..21: mol_type = other RNA
attgaaggttaggctctggat

SEQ ID NO: 599 - RNA, 21 nt, synthetic construct
  modified_base 1: mod_base = OTHER; note = 5'-cyclopropyl phosphonate-2'-O-methyluridine
  modified_base 1^2: mod_base = OTHER; note = phosphorothioate linkage
  modified_base 2: mod_base = OTHER; note = 2'-fluorouridine
  modified_base 2^3: mod_base = OTHER; note = phosphorothioate linkage
  modified_base 3: mod_base = um
  modified_base 3^4: mod_base = OTHER; note = phosphorothioate linkage
  modified_base 4: mod_base = OTHER; note = 2'-fluoroadenosine
  modified_base 5: mod_base = gm
  modified_base 6: mod_base = OTHER; note = 2'-fluoroguanosine
  modified_base 7: mod_base = cm
  modified_base 8: mod_base = OTHER; note = 2'-fluorouridine
  modified_base 9: mod_base = cm
  modified_base 10: mod_base = OTHER; note = 2'-fluorouridine
  modified_base 11: mod_base = gm
  modified_base 12: mod_base = OTHER; note = 2'-fluoroguanosine
  modified_base 13: mod_base = OTHER; note = 2'-O-methyladenosine
  modified_base 14: mod_base = OTHER; note = 2'-fluorouridine
  modified_base 15: mod_base = um
  modified_base 16: mod_base = OTHER; note = 2'-fluorouridine
  modified_base 17: mod_base = cm
  modified_base 18: mod_base = OTHER; note = 2'-fluoroadenosine
  modified_base 19: mod_base = gm
  modified_base 20: mod_base = OTHER; note = 2'-fluorouridine
  modified_base 20^21: mod_base = OTHER; note = phosphorothioate linkage
  modified_base 21: mod_base = OTHER; note = 2'-O-methyladenosine
  source 1..21: mol_type = other RNA
tttaggctctggatttcagta

SEQ ID NO: 600 - RNA, 21 nt, synthetic construct
  modified_base 1: mod_base = OTHER; note = 5'-cyclopropyl phosphonate-2'-O-methyluridine
  modified_base 1^2: mod_base = OTHER; note = phosphorothioate linkage
  modified_base 2: mod_base = OTHER; note = 2'-fluorouridine
  modified_base 2^3: mod_base = OTHER; note = phosphorothioate linkage
  modified_base 3: mod_base = OTHER; note = 2'-O-methyladenosine
  modified_base 4: mod_base = OTHER; note = 2'-fluoroguanosine
  modified_base 5: mod_base = cm
  modified_base 6: mod_base = OTHER; note = 2'-fluoroadenosine
  modified_base 7: mod_base = um
  modified_base 8: mod_base = OTHER; note = 2'-fluorouridine
  modified_base 9: mod_base = um
  modified_base 10: mod_base = OTHER; note = 2'-fluoroadenosine
  modified_base 11: mod_base = um
  modified_base 12: mod_base = OTHER; note = 2'-fluorocytidine
  modified_base 13: mod_base = um
  modified_base 14: mod_base = OTHER; note = 2'-fluoroguanosine
  modified_base 15: mod_base = OTHER; note = 2'-O-methyladenosine
  modified_base 16: mod_base = OTHER; note = 2'-fluoroguanosine
  modified_base 17: mod_base = um
  modified_base 18: mod_base = OTHER; note = 2'-fluorouridine
  modified_base 19: mod_base = um
  modified_base 20: mod_base = OTHER; note = 2'-fluorocytidine
  modified_base 20^21: mod_base = OTHER; note = phosphorothioate linkage
  modified_base 21: mod_base = cm
  source 1..21: mol_type = other RNA
ttagcatttatctgagtttcc

SEQ ID NO: 601 - RNA, 21 nt, synthetic construct
  modified_base 1: mod_base = OTHER; note = 5'-cyclopropyl phosphonate-2'-O-methyluridine
  modified_base 2: mod_base = OTHER; note = 2'-fluorouridine
  modified_base 3: mod_base = OTHER; note = 2'-O-methyladenosine
  modified_base 4: mod_base = OTHER; note = 2'-fluoroguanosine
  modified_base 5: mod_base = cm
  modified_base 6: mod_base = OTHER; note = 2'-fluoroadenosine
  modified_base 7: mod_base = um
  modified_base 8: mod_base = OTHER; note = 2'-fluorouridine
  modified_base 9: mod_base = um
  modified_base 10: mod_base = OTHER; note = 2'-fluoroadenosine
  modified_base 11: mod_base = um
  modified_base 12: mod_base = OTHER; note = 2'-fluorocytidine
  modified_base 13: mod_base = um
  modified_base 14: mod_base = OTHER; note = 2'-fluoroguanosine
  modified_base 15: mod_base = OTHER; note = 2'-O-methyladenosine
  modified_base 16: mod_base = OTHER; note = 2'-fluoroguanosine
  modified_base 17: mod_base = um
  modified_base 18: mod_base = OTHER; note = 2'-fluorouridine
  modified_base 19: mod_base = um
  modified_base 20: mod_base = OTHER; note = 2'-fluorocytidine
  modified_base 20^21: mod_base = OTHER; note = phosphorothioate linkage
  modified_base 21: mod_base = cm
  source 1..21: mol_type = other RNA
ttagcatttatctgagtttcc

SEQ ID NO: 602 - RNA, 21 nt, synthetic construct
  modified_base 1: mod_base = OTHER; note = 5'-cyclopropyl phosphonate-2'-O-methyluridine
  modified_base 1^2: mod_base = OTHER; note = phosphorothioate linkage
  modified_base 2: mod_base = OTHER; note = 2'-fluorouridine
  modified_base 2^3: mod_base = OTHER; note = phosphorothioate linkage
  modified_base 3: mod_base = OTHER; note = 2'-O-methyladenosine
  modified_base 4: mod_base = gm
  modified_base 5: mod_base = cm
  modified_base 6: mod_base = OTHER; note = 2'-O-methyladenosine
  modified_base 7: mod_base = um
  modified_base 8: mod_base = um
  modified_base 9: mod_base = um
  modified_base 10: mod_base = OTHER; note = 2'-O-methyladenosine
  modified_base 11: mod_base = um
  modified_base 12: mod_base = OTHER; note = 2'-fluorocytidine
  modified_base 13: mod_base = um
  modified_base 14: mod_base = OTHER; note = 2'-fluoroguanosine
  modified_base 15: mod_base = OTHER; note = 2'-O-methyladenosine
  modified_base 16: mod_base = OTHER; note = 2'-fluoroguanosine
  modified_base 17: mod_base = um
  modified_base 18: mod_base = um
  modified_base 19: mod_base = um
  modified_base 20: mod_base = cm
  modified_base 20^21: mod_base = OTHER; note = phosphorothioate linkage
  modified_base 21: mod_base = cm
  source 1..21: mol_type = other RNA
ttagcatttatctgagtttcc

SEQ ID NO: 603 - RNA, 21 nt, synthetic construct
  modified_base 1: mod_base = OTHER; note = 5'-cyclopropyl phosphonate-2'-O-methyluridine
  modified_base 1^2: mod_base = OTHER; note = phosphorothioate linkage
  modified_base 2: mod_base = OTHER; note = 2'-fluorouridine
  modified_base 2^3: mod_base = OTHER; note = phosphorothioate linkage
  modified_base 3: mod_base = OTHER; note = 2'-O-methyladenosine
  modified_base 4: mod_base = gm
  modified_base 5: mod_base = cm
  modified_base 6: mod_base = OTHER; note = 2'-O-methyladenosine
  modified_base 7: mod_base = um
  modified_base 8: mod_base = um
  modified_base 9: mod_base = OTHER; note = 2'-fluorouridine
  modified_base 10: mod_base = OTHER; note = 2'-O-methyladenosine
  modified_base 11: mod_base = um
  modified_base 12: mod_base = OTHER; note = 2'-fluorocytidine
  modified_base 13: mod_base = um
  modified_base 14: mod_base = OTHER; note = 2'-fluoroguanosine
  modified_base 15: mod_base = OTHER; note = 2'-O-methyladenosine
  modified_base 16: mod_base = OTHER; note = 2'-fluoroguanosine
  modified_base 17: mod_base = um
  modified_base 18: mod_base = um
  modified_base 19: mod_base = um
  modified_base 20: mod_base = cm
  modified_base 20^21: mod_base = OTHER; note = phosphorothioate linkage
  modified_base 21: mod_base = cm
  source 1..21: mol_type = other RNA
ttagcatttatctgagtttcc

SEQ ID NO: 604 - RNA, 21 nt, synthetic construct
  modified_base 1: mod_base = OTHER; note = 5'-cyclopropyl phosphonate-2'-O-methyluridine
  modified_base 1^2: mod_base = OTHER; note = phosphorothioate linkage
  modified_base 2: mod_base = OTHER; note = 2'-fluorouridine
  modified_base 2^3: mod_base = OTHER; note = phosphorothioate linkage
  modified_base 3: mod_base = OTHER; note = 2'-O-methyladenosine
  modified_base 4: mod_base = gm
  modified_base 5: mod_base = OTHER; note = 2'-fluorocytidine
  modified_base 6: mod_base = OTHER; note = 2'-O-methyladenosine
  modified_base 7: mod_base = um
  modified_base 8: mod_base = um
  modified_base 9: mod_base = um
  modified_base 10: mod_base = OTHER; note = 2'-O-methyladenosine
  modified_base 11: mod_base = um
  modified_base 12: mod_base = OTHER; note = 2'-fluorocytidine
  modified_base 13: mod_base = um
  modified_base 14: mod_base = OTHER; note = 2'-fluoroguanosine
  modified_base 15: mod_base = OTHER; note = 2'-O-methyladenosine
  modified_base 16: mod_base = OTHER; note = 2'-fluoroguanosine
  modified_base 17: mod_base = um
  modified_base 18: mod_base = um
  modified_base 19: mod_base = um
  modified_base 20: mod_base = cm
  modified_base 20^21: mod_base = OTHER; note = phosphorothioate linkage
  modified_base 21: mod_base = cm
  source 1..21: mol_type = other RNA
ttagcatttatctgagtttcc

SEQ ID NO: 605 - RNA, 21 nt, synthetic construct
  modified_base 1: mod_base = OTHER; note = 5'-cyclopropyl phosphonate-2'-O-methyluridine
  modified_base 1^2: mod_base = OTHER; note = phosphorothioate linkage
  modified_base 2: mod_base = OTHER; note = 2'-fluorouridine
  modified_base 2^3: mod_base = OTHER; note = phosphorothioate linkage
  modified_base 3: mod_base = OTHER; note = 2'-O-methyladenosine
  modified_base 4: mod_base = gm
  modified_base 5: mod_base = cm
  modified_base 6: mod_base = OTHER; note = 2'-O-methyladenosine
  modified_base 7: mod_base = OTHER; note = 2'-fluorouridine
  modified_base 8: mod_base = um
  modified_base 9: mod_base = um
  modified_base 10: mod_base = OTHER; note = 2'-O-methyladenosine
  modified_base 11: mod_base = um
  modified_base 12: mod_base = OTHER; note = 2'-fluorocytidine
  modified_base 13: mod_base = um
  modified_base 14: mod_base = OTHER; note = 2'-fluoroguanosine
  modified_base 15: mod_base = OTHER; note = 2'-O-methyladenosine
  modified_base 16: mod_base = OTHER; note = 2'-fluoroguanosine
  modified_base 17: mod_base = um
  modified_base 18: mod_base = um
  modified_base 19: mod_base = um
  modified_base 20: mod_base = cm
  modified_base 20^21: mod_base = OTHER; note = phosphorothioate linkage
  modified_base 21: mod_base = cm
  source 1..21: mol_type = other RNA
ttagcatttatctgagtttcc

SEQ ID NO: 606 - RNA, 21 nt, synthetic construct
  modified_base 1: mod_base = OTHER; note = 5'-cyclopropyl phosphonate-2'-O-methyluridine
  modified_base 1^2: mod_base = OTHER; note = phosphorothioate linkage
  modified_base 2: mod_base = OTHER; note = 2'-fluorouridine
  modified_base 2^3: mod_base = OTHER; note = phosphorothioate linkage
  modified_base 3: mod_base = OTHER; note = 2'-O-methyladenosine
  modified_base 4: mod_base = gm
  modified_base 5: mod_base = cm
  modified_base 6: mod_base = OTHER; note = 2'-O-methyladenosine
  modified_base 7: mod_base = um
  modified_base 8: mod_base = OTHER; note = 2'-fluorouridine
  modified_base 9: mod_base = um
  modified_base 10: mod_base = OTHER; note = 2'-O-methyladenosine
  modified_base 11: mod_base = um
  modified_base 12: mod_base = OTHER; note = 2'-fluorocytidine
  modified_base 13: mod_base = um
  modified_base 14: mod_base = OTHER; note = 2'-fluoroguanosine
  modified_base 15: mod_base = OTHER; note = 2'-O-methyladenosine
  modified_base 16: mod_base = OTHER; note = 2'-fluoroguanosine
  modified_base 17: mod_base = um
  modified_base 18: mod_base = um
  modified_base 19: mod_base = um
  modified_base 20: mod_base = cm
  modified_base 20^21: mod_base = OTHER; note = phosphorothioate linkage
  modified_base 21: mod_base = cm
  source 1..21: mol_type = other RNA
ttagcatttatctgagtttcc

SEQ ID NO: 607 - RNA, 21 nt, synthetic construct
  modified_base 1: mod_base = OTHER; note = 5'-cyclopropyl phosphonate-2'-O-methyluridine
  modified_base 1^2: mod_base = OTHER; note = phosphorothioate linkage
  modified_base 2: mod_base = OTHER; note = 2'-fluorouridine
  modified_base 2^3: mod_base = OTHER; note = phosphorothioate linkage
  modified_base 3: mod_base = OTHER; note = 2'-O-methyladenosine
  modified_base 4: mod_base = OTHER; note = 2'-fluoroguanosine
  modified_base 5: mod_base = cm
  modified_base 6: mod_base = OTHER; note = 2'-fluoroadenosine
  modified_base 7: mod_base = OTHER; note = 2'-fluorouridine
  modified_base 8: mod_base = um
  modified_base 9: mod_base = um
  modified_base 10: mod_base = OTHER; note = 2'-O-methyladenosine
  modified_base 11: mod_base = um
  modified_base 12: mod_base = OTHER; note = 2'-fluorocytidine
  modified_base 13: mod_base = um
  modified_base 14: mod_base = OTHER; note = 2'-fluoroguanosine
  modified_base 15: mod_base = OTHER; note = 2'-O-methyladenosine
  modified_base 16: mod_base = OTHER; note = 2'-fluoroguanosine
  modified_base 17: mod_base = um
  modified_base 18: mod_base = um
  modified_base 19: mod_base = um
  modified_base 20: mod_base = cm
  modified_base 20^21: mod_base = OTHER; note = phosphorothioate linkage
  modified_base 21: mod_base = cm
  source 1..21: mol_type = other RNA
ttagcatttatctgagtttcc

SEQ ID NO: 608 - RNA, 21 nt, synthetic construct
  modified_base 1: mod_base = OTHER; note = 5'-cyclopropyl phosphonate-2'-O-methyluridine
  modified_base 1^2: mod_base = OTHER; note = phosphorothioate linkage
  modified_base 2: mod_base = OTHER; note = 2'-deoxythymidine
  modified_base 2^3: mod_base = OTHER; note = phosphorothioate linkage
  modified_base 3: mod_base = OTHER; note = 2'-O-methyladenosine
  modified_base 4: mod_base = gm
  modified_base 5: mod_base = cm
  modified_base 6: mod_base = OTHER; note = 2'-O-methyladenosine
  modified_base 7: mod_base = um
  modified_base 8: mod_base = um
  modified_base 9: mod_base = um
  modified_base 10: mod_base = OTHER; note = 2'-O-methyladenosine
  modified_base 11: mod_base = um
  modified_base 12: mod_base = OTHER; note = 2'-fluorocytidine
  modified_base 13: mod_base = um
  modified_base 14: mod_base = OTHER; note = 2'-fluoroguanosine
  modified_base 15: mod_base = OTHER; note = 2'-O-methyladenosine
  modified_base 16: mod_base = OTHER; note = 2'-fluoroguanosine
  modified_base 17: mod_base = um
  modified_base 18: mod_base = um
  modified_base 19: mod_base = um
  modified_base 20: mod_base = cm
  modified_base 20^21: mod_base = OTHER; note = phosphorothioate linkage
  modified_base 21: mod_base = cm
  source 1..21: mol_type = other RNA
ttagcatttatctgagtttcc

SEQ ID NO: 609 - RNA, 21 nt, synthetic construct
  modified_base 1: mod_base = OTHER; note = 5'-cyclopropyl phosphonate-2'-O-methyladenosine
  modified_base 1^2: mod_base = OTHER; note = phosphorothioate linkage
  modified_base 2: mod_base = OTHER; note = 2'-fluoroguanosine
  modified_base 2^3: mod_base = OTHER; note = phosphorothioate linkage
  modified_base 3: mod_base = OTHER; note = 2'-O-methyladenosine
  modified_base 4: mod_base = OTHER; note = 2'-fluorocytidine
  modified_base 5: mod_base = OTHER; note = 2'-O-methyladenosine
  modified_base 6: mod_base = OTHER; note = 2'-fluorouridine
  modified_base 7: mod_base = um
  modified_base 8: mod_base = OTHER; note = 2'-fluorouridine
  modified_base 9: mod_base = OTHER; note = 2'-O-methyladenosine
  modified_base 10: mod_base = OTHER; note = 2'-fluorouridine
  modified_base 11: mod_base = um
  modified_base 12: mod_base = OTHER; note = 2'-fluoroguanosine
  modified_base 13: mod_base = gm
  modified_base 14: mod_base = OTHER; note = 2'-fluorouridine
  modified_base 15: mod_base = um
  modified_base 16: mod_base = OTHER; note = 2'-fluoroguanosine
  modified_base 17: mod_base = um
  modified_base 18: mod_base = OTHER; note = 2'-fluoroguanosine
  modified_base 19: mod_base = OTHER; note = 2'-O-methyladenosine
  modified_base 20: mod_base = OTHER; note = 2'-fluorocytidine
  modified_base 20^21: mod_base = OTHER; note = phosphorothioate linkage
  modified_base 21: mod_base = um
  source 1..21: mol_type = other RNA
agacatttattggttgtgact

SEQ ID NO: 610 - RNA, 21 nt, synthetic construct
  modified_base 1: mod_base = OTHER; note = 5'-cyclopropyl phosphonate-2'-O-methyladenosine
  modified_base 1^2: mod_base = OTHER; note = phosphorothioate linkage
  modified_base 2: mod_base = OTHER; note = 2'-fluoroguanosine
  modified_base 2^3: mod_base = OTHER; note = phosphorothioate linkage
  modified_base 3: mod_base = OTHER; note = 2'-O-methyladenosine
  modified_base 4: mod_base = cm
  modified_base 5: mod_base = OTHER; note = 2'-O-methyladenosine
  modified_base 6: mod_base = um
  modified_base 7: mod_base = um
  modified_base 8: mod_base = um
  modified_base 9: mod_base = OTHER; note = 2'-O-methyladenosine
  modified_base 10: mod_base = um
  modified_base 11: mod_base = um
  modified_base 12: mod_base = OTHER; note = 2'-fluoroguanosine
  modified_base 13: mod_base = gm
  modified_base 14: mod_base = OTHER; note = 2'-fluorouridine
  modified_base 15: mod_base = um
  modified_base 16: mod_base = OTHER; note = 2'-fluoroguanosine
  modified_base 17: mod_base = um
  modified_base 18: mod_base = gm
  modified_base 19: mod_base = OTHER; note = 2'-O-methyladenosine
  modified_base 20: mod_base = cm
  modified_base 20^21: mod_base = OTHER; note = phosphorothioate linkage
  modified_base 21: mod_base = um
  source 1..21: mol_type = other RNA
agacatttattggttgtgact

SEQ ID NO: 611 - RNA, 21 nt, synthetic construct
  modified_base 1: mod_base = OTHER; note = 5'-cyclopropyl phosphonate-2'-O-methyladenosine
  modified_base 1^2: mod_base = OTHER; note = phosphorothioate linkage
  modified_base 2: mod_base = OTHER; note = 2'-fluoroguanosine
  modified_base 2^3: mod_base = OTHER; note = phosphorothioate linkage
  modified_base 3: mod_base = OTHER; note = 2'-O-methyladenosine
  modified_base 4: mod_base = cm
  modified_base 5: mod_base = OTHER; note = 2'-O-methyladenosine
  modified_base 6: mod_base = um
  modified_base 7: mod_base = um
  modified_base 8: mod_base = um
  modified_base 9: mod_base = OTHER; note = 2'-O-methyladenosine
  modified_base 10: mod_base = OTHER; note = 2'-fluorouridine
  modified_base 11: mod_base = um
  modified_base 12: mod_base = OTHER; note = 2'-fluoroguanosine
  modified_base 13: mod_base = gm
  modified_base 14: mod_base = OTHER; note = 2'-fluorouridine
  modified_base 15: mod_base = um
  modified_base 16: mod_base = OTHER; note = 2'-fluoroguanosine
  modified_base 17: mod_base = um
  modified_base 18: mod_base = gm
  modified_base 19: mod_base = OTHER; note = 2'-O-methyladenosine
  modified_base 20: mod_base = cm
  modified_base 20^21: mod_base = OTHER; note = phosphorothioate linkage
  modified_base 21: mod_base = um
  source 1..21: mol_type = other RNA
agacatttattggttgtgact

SEQ ID NO: 612 - RNA, 21 nt, synthetic construct
  modified_base 1: mod_base = OTHER; note = 5'-cyclopropyl phosphonate-2'-O-methyladenosine
  modified_base 1^2: mod_base = OTHER; note = phosphorothioate linkage
  modified_base 2: mod_base = OTHER; note = 2'-fluoroguanosine
  modified_base 2^3: mod_base = OTHER; note = phosphorothioate linkage
  modified_base 3: mod_base = OTHER; note = 2'-O-methyladenosine
  modified_base 4: mod_base = cm
  modified_base 5: mod_base = OTHER; note = 2'-O-methyladenosine
  modified_base 6: mod_base = um
  modified_base 7: mod_base = um
  modified_base 8: mod_base = um
  modified_base 9: mod_base = OTHER; note = 2'-fluoroadenosine
  modified_base 10: mod_base = um
  modified_base 11: mod_base = um
  modified_base 12: mod_base = OTHER; note = 2'-fluoroguanosine
  modified_base 13: mod_base = gm
  modified_base 14: mod_base = OTHER; note = 2'-fluorouridine
  modified_base 15: mod_base = um
  modified_base 16: mod_base = OTHER; note = 2'-fluoroguanosine
  modified_base 17: mod_base = um
  modified_base 18: mod_base = gm
  modified_base 19: mod_base = OTHER; note = 2'-O-methyladenosine
  modified_base 20: mod_base = cm
  modified_base 20^21: mod_base = OTHER; note = phosphorothioate linkage
  modified_base 21: mod_base = um
  source 1..21: mol_type = other RNA
agacatttattggttgtgact

SEQ ID NO: 613 - RNA, 21 nt, synthetic construct
  modified_base 1: mod_base = OTHER; note = 5'-cyclopropyl phosphonate-2'-O-methyladenosine
  modified_base 1^2: mod_base = OTHER; note = phosphorothioate linkage
  modified_base 2: mod_base = OTHER; note = 2'-fluoroguanosine
  modified_base 2^3: mod_base = OTHER; note = phosphorothioate linkage
  modified_base 3: mod_base = OTHER; note = 2'-O-methyladenosine
  modified_base 4: mod_base = cm
  modified_base 5: mod_base = OTHER; note = 2'-O-methyladenosine
  modified_base 6: mod_base = um
  modified_base 7: mod_base = OTHER; note = 2'-fluorouridine
  modified_base 8: mod_base = um
  modified_base 9: mod_base = OTHER; note = 2'-O-methyladenosine
  modified_base 10: mod_base = um
  modified_base 11: mod_base = um
  modified_base 12: mod_base = OTHER; note = 2'-fluoroguanosine
  modified_base 13: mod_base = gm
  modified_base 14: mod_base = OTHER; note = 2'-fluorouridine
  modified_base 15: mod_base = um
  modified_base 16: mod_base = OTHER; note = 2'-fluoroguanosine
  modified_base 17: mod_base = um
  modified_base 18: mod_base = gm
  modified_base 19: mod_base = OTHER; note = 2'-O-methyladenosine
  modified_base 20: mod_base = cm
  modified_base 20^21: mod_base = OTHER; note = phosphorothioate linkage
  modified_base 21: mod_base = um
  source 1..21: mol_type = other RNA
agacatttattggttgtgact

SEQ ID NO: 614 - RNA, 21 nt, synthetic construct
  modified_base 1: mod_base = OTHER; note = 5'-cyclopropyl phosphonate-2'-O-methyladenosine
  modified_base 1^2: mod_base = OTHER; note = phosphorothioate linkage
  modified_base 2: mod_base = OTHER; note = 2'-fluoroguanosine
  modified_base 2^3: mod_base = OTHER; note = phosphorothioate linkage
  modified_base 3: mod_base = OTHER; note = 2'-O-methyladenosine
  modified_base 4: mod_base = cm
  modified_base 5: mod_base = OTHER; note = 2'-fluoroadenosine
  modified_base 6: mod_base = OTHER; note = 2'-fluorouridine
  modified_base 7: mod_base = um
  modified_base 8: mod_base = um
  modified_base 9: mod_base = OTHER; note = 2'-fluoroadenosine
  modified_base 10: mod_base = um
  modified_base 11: mod_base = um
  modified_base 12: mod_base = OTHER; note = 2'-fluoroguanosine
  modified_base 13: mod_base = gm
  modified_base 14: mod_base = OTHER; note = 2'-fluorouridine
  modified_base 15: mod_base = um
  modified_base 16: mod_base = OTHER; note = 2'-fluoroguanosine
  modified_base 17: mod_base = um
  modified_base 18: mod_base = gm
  modified_base 19: mod_base = OTHER; note = 2'-O-methyladenosine
  modified_base 20: mod_base = cm
  modified_base 20^21: mod_base = OTHER; note = phosphorothioate linkage
  modified_base 21: mod_base = um
  source 1..21: mol_type = other RNA
agacatttattggttgtgact

SEQ ID NO: 615 - RNA, 21 nt, synthetic construct
  modified_base 1: mod_base = OTHER; note = 5'-cyclopropyl phosphonate-2'-O-methyladenosine
  modified_base 1^2: mod_base = OTHER; note = phosphorothioate linkage
  modified_base 2: mod_base = OTHER; note = 2'-fluoroguanosine
  modified_base 2^3: mod_base = OTHER; note = phosphorothioate linkage
  modified_base 3: mod_base = OTHER; note = 2'-O-methyladenosine
  modified_base 4: mod_base = OTHER; note = 2'-fluorocytidine
  modified_base 5: mod_base = OTHER; note = 2'-O-methyladenosine
  modified_base 6: mod_base = OTHER; note = 2'-fluorouridine
  modified_base 7: mod_base = OTHER; note = 2'-fluorouridine
  modified_base 8: mod_base = um
  modified_base 9: mod_base = OTHER; note = 2'-O-methyladenosine
  modified_base 10: mod_base = um
  modified_base 11: mod_base = um
  modified_base 12: mod_base = OTHER; note = 2'-fluoroguanosine
  modified_base 13: mod_base = gm
  modified_base 14: mod_base = OTHER; note = 2'-fluorouridine
  modified_base 15: mod_base = um
  modified_base 16: mod_base = OTHER; note = 2'-fluoroguanosine
  modified_base 17: mod_base = um
  modified_base 18: mod_base = gm
  modified_base 19: mod_base = OTHER; note = 2'-O-methyladenosine
  modified_base 20: mod_base = cm
  modified_base 20^21: mod_base = OTHER; note = phosphorothioate linkage
  modified_base 21: mod_base = um
  source 1..21: mol_type = other RNA
agacatttattggttgtgact

SEQ ID NO: 616 - RNA, 21 nt, synthetic construct
  modified_base 1: mod_base = OTHER; note = 5'-cyclopropyl phosphonate-2'-O-methyladenosine
  modified_base 2: mod_base = OTHER; note = 2'-fluoroguanosine
  modified_base 3: mod_base = OTHER; note = 2'-O-methyladenosine
  modified_base 4: mod_base = cm
  modified_base 5: mod_base = OTHER; note = 2'-O-methyladenosine
  modified_base 6: mod_base = um
  modified_base 7: mod_base = um
  modified_base 8: mod_base = um
  modified_base 9: mod_base = OTHER; note = 2'-O-methyladenosine
  modified_base 10: mod_base = OTHER; note = 2'-fluorouridine
  modified_base 11: mod_base = um
  modified_base 12: mod_base = OTHER; note = 2'-fluoroguanosine
  modified_base 13: mod_base = gm
  modified_base 14: mod_base = OTHER; note = 2'-fluorouridine
  modified_base 15: mod_base = um
  modified_base 16: mod_base = OTHER; note = 2'-fluoroguanosine
  modified_base 17: mod_base = um
  modified_base 18: mod_base = gm
  modified_base 19: mod_base = OTHER; note = 2'-O-methyladenosine
  modified_base 20: mod_base = cm
  modified_base 20^21: mod_base = OTHER; note = phosphorothioate linkage
  modified_base 21: mod_base = um
  source 1..21: mol_type = other RNA
agacatttattggttgtgact

SEQ ID NO: 617 - RNA, 21 nt, synthetic construct
  modified_base 1: mod_base = OTHER; note = 5'-cyclopropyl phosphonate-2'-O-methyluridine
  modified_base 1^2: mod_base = OTHER; note = phosphorothioate linkage
  modified_base 2: mod_base = OTHER; note = 2'-fluoroguanosine
  modified_base 2^3: mod_base = OTHER; note = phosphorothioate linkage
  modified_base 3: mod_base = gm
  modified_base 3^4: mod_base = OTHER; note = phosphorothioate linkage
  modified_base 4: mod_base = OTHER; note = 2'-fluoroguanosine
  modified_base 5: mod_base = OTHER; note = 2'-O-methyladenosine
  modified_base 6: mod_base = OTHER; note = 2'-fluorouridine
  modified_base 7: mod_base = um
  modified_base 8: mod_base = OTHER; note = 2'-fluoroguanosine
  modified_base 9: mod_base = OTHER; note = 2'-O-methyladenosine
  modified_base 10: mod_base = OTHER; note = 2'-fluoroadenosine
  modified_base 11: mod_base = gm
  modified_base 12: mod_base = OTHER; note = 2'-fluoroguanosine
  modified_base 13: mod_base = um
  modified_base 14: mod_base = OTHER; note = 2'-fluorouridine
  modified_base 15: mod_base = OTHER; note = 2'-O-methyladenosine
  modified_base 16: mod_base = OTHER; note = 2'-fluoroguanosine
  modified_base 17: mod_base = gm
  modified_base 18: mod_base = OTHER; note = 2'-fluorocytidine
  modified_base 19: mod_base = um
  modified_base 20: mod_base = OTHER; note = 2'-fluorocytidine
  modified_base 20^21: mod_base = OTHER; note = phosphorothioate linkage
  modified_base 21: mod_base = um
  source 1..21: mol_type = other RNA
tgggattgaaggttaggctct

SEQ ID NO: 618 - RNA, 21 nt, synthetic construct
  modified_base 1: mod_base = OTHER; note = 5'-cyclopropyl phosphonate-2'-O-methyluridine
  modified_base 1^2: mod_base = OTHER; note = phosphorothioate linkage
  modified_base 2: mod_base = OTHER; note = 2'-fluorouridine
  modified_base 2^3: mod_base = OTHER; note = phosphorothioate linkage
  modified_base 3: mod_base = OTHER; note = 2'-O-methyladenosine
  modified_base 4: mod_base = gm
  modified_base 5: mod_base = OTHER; note = 2'-deoxycytidine
  modified_base 6: mod_base = OTHER; note = 2'-O-methyladenosine
  modified_base 7: mod_base = um
  modified_base 8: mod_base = um
  modified_base 9: mod_base = um
  modified_base 10: mod_base = OTHER; note = 2'-O-methyladenosine
  modified_base 11: mod_base = um
  modified_base 12: mod_base = OTHER; note = 2'-fluorocytidine
  modified_base 13: mod_base = um
  modified_base 14: mod_base = OTHER; note = 2'-fluoroguanosine
  modified_base 15: mod_base = OTHER; note = 2'-O-methyladenosine
  modified_base 16: mod_base = gm
  modified_base 17: mod_base = um
  modified_base 18: mod_base = um
  modified_base 19: mod_base = um
  modified_base 20: mod_base = cm
  modified_base 20^21: mod_base = OTHER; note = phosphorothioate linkage
  modified_base 21: mod_base = cm
  source 1..21: mol_type = other RNA
ttagcatttatctgagtttcc

SEQ ID NO: 619 - RNA, 21 nt, synthetic construct
  modified_base 1: mod_base = OTHER; note = 5'-cyclopropyl phosphonate-2'-O-methyluridine
  modified_base 1^2: mod_base = OTHER; note = phosphorothioate linkage
  modified_base 2: mod_base = OTHER; note = 2'-fluorouridine
  modified_base 2^3: mod_base = OTHER; note = phosphorothioate linkage
  modified_base 3: mod_base = OTHER; note = 2'-O-methyladenosine
  modified_base 4: mod_base = gm
  modified_base 5: mod_base = cm
  modified_base 6: mod_base = OTHER; note = 2'-O-methyladenosine
  modified_base 7: mod_base = um
  modified_base 8: mod_base = um
  modified_base 9: mod_base = OTHER; note = 2'-deoxythymidine
  modified_base 10: mod_base = OTHER; note = 2'-O-methyladenosine
  modified_base 11: mod_base = um
  modified_base 12: mod_base = OTHER; note = 2'-fluorocytidine
  modified_base 13: mod_base = um
  modified_base 14: mod_base = OTHER; note = 2'-fluoroguanosine
  modified_base 15: mod_base = OTHER; note = 2'-O-methyladenosine
  modified_base 16: mod_base = gm
  modified_base 17: mod_base = um
  modified_base 18: mod_base = um
  modified_base 19: mod_base = um
  modified_base 20: mod_base = cm
  modified_base 20^21: mod_base = OTHER; note = phosphorothioate linkage
  modified_base 21: mod_base = cm
  source 1..21: mol_type = other RNA
ttagcatttatctgagtttcc

SEQ ID NO: 620 - RNA, 21 nt, synthetic construct
  modified_base 1: mod_base = OTHER; note = 5'-cyclopropyl phosphonate-2'-O-methyluridine
  modified_base 1^2: mod_base = OTHER; note = phosphorothioate linkage
  modified_base 2: mod_base = OTHER; note = 2'-deoxythymidine
  modified_base 2^3: mod_base = OTHER; note = phosphorothioate linkage
  modified_base 3: mod_base = OTHER; note = 2'-O-methyladenosine
  modified_base 4: mod_base = gm
  modified_base 5: mod_base = cm
  modified_base 6: mod_base = OTHER; note = 2'-O-methyladenosine
  modified_base 7: mod_base = um
  modified_base 8: mod_base = um
  modified_base 9: mod_base = OTHER; note = 2'-deoxythymidine
  modified_base 10: mod_base = OTHER; note = 2'-O-methyladenosine
  modified_base 11: mod_base = um
  modified_base 12: mod_base = OTHER; note = 2'-fluorocytidine
  modified_base 13: mod_base = um
  modified_base 14: mod_base = OTHER; note = 2'-deoxyguanosine
  modified_base 15: mod_base = OTHER; note = 2'-O-methyladenosine
  modified_base 16: mod_base = gm
  modified_base 17: mod_base = um
  modified_base 18: mod_base = um
  modified_base 19: mod_base = um
  modified_base 20: mod_base = cm
  modified_base 20^21: mod_base = OTHER; note = phosphorothioate linkage
  modified_base 21: mod_base = cm
  source 1..21: mol_type = other RNA
ttagcatttatctgagtttcc

SEQ ID NO: 621 - RNA, 21 nt, synthetic construct
  modified_base 1: mod_base = OTHER; note = 5'-cyclopropyl phosphonate-2'-O-methyluridine
  modified_base 1^2: mod_base = OTHER; note = phosphorothioate linkage
  modified_base 2: mod_base = OTHER; note = 2'-deoxythymidine
  modified_base 2^3: mod_base = OTHER; note = phosphorothioate linkage
  modified_base 3: mod_base = OTHER; note = 2'-O-methyladenosine
  modified_base 4: mod_base = gm
  modified_base 5: mod_base = cm
  modified_base 6: mod_base = OTHER; note = 2'-O-methyladenosine
  modified_base 7: mod_base = um
  modified_base 8: mod_base = um
  modified_base 9: mod_base = OTHER; note = 2'-deoxythymidine
  modified_base 10: mod_base = OTHER; note = 2'-O-methyladenosine
  modified_base 11: mod_base = um
  modified_base 12: mod_base = OTHER; note = 2'-fluorocytidine
  modified_base 13: mod_base = um
  modified_base 14: mod_base = OTHER; note = 2'-deoxyguanosine
  modified_base 15: mod_base = OTHER; note = 2'-O-methyladenosine
  modified_base 16: mod_base = OTHER; note = 2'-deoxyguanosine
  modified_base 17: mod_base = um
  modified_base 18: mod_base = um
  modified_base 19: mod_base = um
  modified_base 20: mod_base = cm
  modified_base 20^21: mod_base = OTHER; note = phosphorothioate linkage
  modified_base 21: mod_base = cm
  source 1..21: mol_type = other RNA
ttagcatttatctgagtttcc

SEQ ID NO: 622 - RNA, 21 nt, synthetic construct
  modified_base 1: mod_base = OTHER; note = 5'-cyclopropyl phosphonate-2'-O-methyluridine
  modified_base 1^2: mod_base = OTHER; note = phosphorothioate linkage
  modified_base 2: mod_base = OTHER; note = 2'-fluorouridine
  modified_base 2^3: mod_base = OTHER; note = phosphorothioate linkage
  modified_base 3: mod_base = OTHER; note = 2'-O-methyladenosine
  modified_base 4: mod_base = gm
  modified_base 5: mod_base = cm
  modified_base 6: mod_base = OTHER; note = 2'-O-methyladenosine
  modified_base 7: mod_base = um
  modified_base 8: mod_base = um
  modified_base 9: mod_base = um
  modified_base 10: mod_base = OTHER; note = 2'-O-methyladenosine
  modified_base 11: mod_base = um
  modified_base 12: mod_base = OTHER; note = 2'-fluorocytidine
  modified_base 13: mod_base = um
  modified_base 14: mod_base = OTHER; note = 2'-fluoroguanosine
  modified_base 15: mod_base = OTHER; note = 2'-O-methyladenosine
  modified_base 16: mod_base = gm
  modified_base 17: mod_base = um
  modified_base 18: mod_base = um
  modified_base 19: mod_base = um
  modified_base 20: mod_base = cm
  modified_base 20^21: mod_base = OTHER; note = phosphorothioate linkage
  modified_base 21: mod_base = cm
  source 1..21: mol_type = other RNA
ttagcatttatctgagtttcc

SEQ ID NO: 623 - RNA, 21 nt, synthetic construct
  modified_base 1: mod_base = OTHER; note = 5'-cyclopropyl phosphonate-2'-O-methyluridine
  modified_base 1^2: mod_base = OTHER; note = phosphorothioate linkage
  modified_base 2: mod_base = OTHER; note = 2'-fluorouridine
  modified_base 2^3: mod_base = OTHER; note = phosphorothioate linkage
  modified_base 3: mod_base = OTHER; note = 2'-O-methyladenosine
  modified_base 4: mod_base = gm
  modified_base 5: mod_base = cm
  modified_base 6: mod_base = OTHER; note = 2'-O-methyladenosine
  modified_base 7: mod_base = OTHER; note = thymine glycol nucleic acid
  modified_base 8: mod_base = um
  modified_base 9: mod_base = OTHER; note = 2'-fluorouridine
  modified_base 10: mod_base = OTHER; note = 2'-O-methyladenosine
  modified_base 11: mod_base = um
  modified_base 12: mod_base = OTHER; note = 2'-fluorocytidine
  modified_base 13: mod_base = um
  modified_base 14: mod_base = OTHER; note = 2'-fluoroguanosine
  modified_base 15: mod_base = OTHER; note = 2'-O-methyladenosine
  modified_base 16: mod_base = OTHER; note = 2'-fluoroguanosine
  modified_base 17: mod_base = um
  modified_base 18: mod_base = um
  modified_base 19: mod_base = um
  modified_base 20: mod_base = cm
  modified_base 20^21: mod_base = OTHER; note = phosphorothioate linkage
  modified_base 21: mod_base = cm
  source 1..21: mol_type = other RNA
ttagcatttatctgagtttcc

SEQ ID NO: 624 - RNA, 21 nt, synthetic construct
  modified_base 1: mod_base = OTHER; note = 5'-cyclopropyl phosphonate-2'-O-methyluridine
  modified_base 1^2: mod_base = OTHER; note = phosphorothioate linkage
  modified_base 2: mod_base = OTHER; note = 2'-fluorouridine
  modified_base 2^3: mod_base = OTHER; note = phosphorothioate linkage
  modified_base 3: mod_base = OTHER; note = 2'-O-methyladenosine
  modified_base 4: mod_base = gm
  modified_base 5: mod_base = cm
  modified_base 6: mod_base = OTHER; note = 2'-O-methyladenosine
  modified_base 7: mod_base = OTHER; note = 2 ,3 -seco-uridine
  modified_base 8: mod_base = um
  modified_base 9: mod_base = OTHER; note = 2'-fluorouridine
  modified_base 10: mod_base = OTHER; note = 2'-O-methyladenosine
  modified_base 11: mod_base = um
  modified_base 12: mod_base = OTHER; note = 2'-fluorocytidine
  modified_base 13: mod_base = um
  modified_base 14: mod_base = OTHER; note = 2'-fluoroguanosine
  modified_base 15: mod_base = OTHER; note = 2'-O-methyladenosine
  modified_base 16: mod_base = OTHER; note = 2'-fluoroguanosine
  modified_base 17: mod_base = um
  modified_base 18: mod_base = um
  modified_base 19: mod_base = um
  modified_base 20: mod_base = cm
  modified_base 20^21: mod_base = OTHER; note = phosphorothioate linkage
  modified_base 21: mod_base = cm
  source 1..21: mol_type = other RNA
ttagcatttatctgagtttcc

SEQ ID NO: 625 - RNA, 19 nt, synthetic construct
  modified_base 1: mod_base = OTHER; note = 5'-cyclopropyl phosphonate-2'-O-methyluridine
  modified_base 1^2: mod_base = OTHER; note = phosphorothioate linkage
  modified_base 2: mod_base = OTHER; note = 2'-fluorouridine
  modified_base 2^3: mod_base = OTHER; note = phosphorothioate linkage
  modified_base 3: mod_base = OTHER; note = 2'-O-methyladenosine
  modified_base 4: mod_base = gm
  modified_base 5: mod_base = cm
  modified_base 6: mod_base = OTHER; note = 2'-O-methyladenosine
  modified_base 7: mod_base = um
  modified_base 8: mod_base = OTHER; note = 2'-fluorouridine
  modified_base 9: mod_base = um
  modified_base 10: mod_base = OTHER; note = 2'-O-methyladenosine
  modified_base 11: mod_base = um
  modified_base 12: mod_base = OTHER; note = 2'-fluorocytidine
  modified_base 13: mod_base = um
  modified_base 14: mod_base = OTHER; note = 2'-fluoroguanosine
  modified_base 15: mod_base = OTHER; note = 2'-O-methyladenosine
  modified_base 16: mod_base = OTHER; note = 2'-fluoroguanosine
  modified_base 17: mod_base = um
  modified_base 18: mod_base = um
  modified_base 18^19: mod_base = OTHER; note = phosphorothioate linkage
  modified_base 19: mod_base = cm
  source 1..19: mol_type = other RNA
ttagcatttatctgagttc

SEQ ID NO: 626 - RNA, 21 nt, synthetic construct
  modified_base 1: mod_base = OTHER; note = 5'-cyclopropyl phosphonate-2'-O-methyluridine
  modified_base 1^2: mod_base = OTHER; note = phosphorothioate linkage
  modified_base 2: mod_base = OTHER; note = 2'-fluorouridine
  modified_base 2^3: mod_base = OTHER; note = phosphorothioate linkage
  modified_base 3: mod_base = OTHER; note = 2'-O-methyladenosine
  modified_base 4: mod_base = gm
  modified_base 5: mod_base = cm
  modified_base 6: mod_base = OTHER; note = 2'-O-methyladenosine
  modified_base 7: mod_base = um
  modified_base 8: mod_base = OTHER; note = 2'-fluorouridine
  modified_base 9: mod_base = OTHER; note = 2'-fluorouridine
  modified_base 10: mod_base = OTHER; note = 2'-O-methyladenosine
  modified_base 11: mod_base = um
  modified_base 12: mod_base = OTHER; note = 2'-fluorocytidine
  modified_base 13: mod_base = um
  modified_base 14: mod_base = OTHER; note = 2'-fluoroguanosine
  modified_base 15: mod_base = OTHER; note = 2'-O-methyladenosine
  modified_base 16: mod_base = gm
  modified_base 17: mod_base = um
  modified_base 18: mod_base = um
  modified_base 19: mod_base = um
  modified_base 20: mod_base = cm
  modified_base 20^21: mod_base = OTHER; note = phosphorothioate linkage
  modified_base 21: mod_base = cm
  source 1..21: mol_type = other RNA
ttagcatttatctgagtttcc

SEQ ID NO: 627 - RNA, 21 nt, synthetic construct
  modified_base 1: mod_base = OTHER; note = 5'-cyclopropyl phosphonate-2'-O-methyluridine
  modified_base 1^2: mod_base = OTHER; note = phosphorothioate linkage
  modified_base 2: mod_base = OTHER; note = 2'-fluorouridine
  modified_base 2^3: mod_base = OTHER; note = phosphorothioate linkage
  modified_base 3: mod_base = OTHER; note = 2'-O-methyladenosine
  modified_base 4: mod_base = gm
  modified_base 5: mod_base = cm
  modified_base 6: mod_base = OTHER; note = 2'-O-methyladenosine
  modified_base 7: mod_base = um
  modified_base 8: mod_base = um
  modified_base 9: mod_base = OTHER; note = 2'-fluorouridine
  modified_base 10: mod_base = OTHER; note = 2'-O-methyladenosine
  modified_base 11: mod_base = um
  modified_base 12: mod_base = OTHER; note = 2'-fluorocytidine
  modified_base 13: mod_base = um
  modified_base 14: mod_base = OTHER; note = 2'-fluoroguanosine
  modified_base 15: mod_base = OTHER; note = 2'-O-methyladenosine
  modified_base 16: mod_base = gm
  modified_base 17: mod_base = um
  modified_base 18: mod_base = um
  modified_base 19: mod_base = um
  modified_base 20: mod_base = cm
  modified_base 20^21: mod_base = OTHER; note = phosphorothioate linkage
  modified_base 21: mod_base = cm
  source 1..21: mol_type = other RNA
ttagcatttatctgagtttcc

SEQ ID NO: 628 - RNA, 21 nt, synthetic construct
  modified_base 1: mod_base = OTHER; note = 5'-cyclopropyl phosphonate-2'-O-methyluridine
  modified_base 1^2: mod_base = OTHER; note = phosphorothioate linkage
  modified_base 2: mod_base = OTHER; note = 2'-fluorouridine
  modified_base 2^3: mod_base = OTHER; note = phosphorothioate linkage
  modified_base 3: mod_base = OTHER; note = 2'-O-methyladenosine
  modified_base 4: mod_base = gm
  modified_base 5: mod_base = OTHER; note = 2'-fluorocytidine
  modified_base 6: mod_base = OTHER; note = 2'-O-methyladenosine
  modified_base 7: mod_base = um
  modified_base 8: mod_base = um
  modified_base 9: mod_base = OTHER; note = 2'-fluorouridine
  modified_base 10: mod_base = OTHER; note = 2'-O-methyladenosine
  modified_base 11: mod_base = um
  modified_base 12: mod_base = OTHER; note = 2'-fluorocytidine
  modified_base 13: mod_base = um
  modified_base 14: mod_base = OTHER; note = 2'-fluoroguanosine
  modified_base 15: mod_base = OTHER; note = 2'-O-methyladenosine
  modified_base 16: mod_base = gm
  modified_base 17: mod_base = um
  modified_base 18: mod_base = um
  modified_base 19: mod_base = um
  modified_base 20: mod_base = cm
  modified_base 20^21: mod_base = OTHER; note = phosphorothioate linkage
  modified_base 21: mod_base = cm
  source 1..21: mol_type = other RNA
ttagcatttatctgagtttcc

SEQ ID NO: 629 - RNA, 21 nt, synthetic construct
  modified_base 1: mod_base = OTHER; note = 5'-cyclopropyl phosphonate-2'-O-methyluridine
  modified_base 1^2: mod_base = OTHER; note = phosphorothioate linkage
  modified_base 2: mod_base = OTHER; note = 2'-deoxythymidine
  modified_base 2^3: mod_base = OTHER; note = phosphorothioate linkage
  modified_base 3: mod_base = OTHER; note = 2'-O-methyladenosine
  modified_base 4: mod_base = gm
  modified_base 5: mod_base = cm
  modified_base 6: mod_base = OTHER; note = 2'-O-methyladenosine
  modified_base 7: mod_base = um
  modified_base 8: mod_base = um
  modified_base 9: mod_base = OTHER; note = 2'-deoxythymidine
  modified_base 10: mod_base = OTHER; note = 2'-O-methyladenosine
  modified_base 11: mod_base = um
  modified_base 12: mod_base = OTHER; note = 2'-fluorocytidine
  modified_base 13: mod_base = um
  modified_base 14: mod_base = OTHER; note = 2'-fluoroguanosine
  modified_base 15: mod_base = OTHER; note = 2'-O-methyladenosine
  modified_base 16: mod_base = gm
  modified_base 17: mod_base = um
  modified_base 18: mod_base = um
  modified_base 19: mod_base = um
  modified_base 20: mod_base = cm
  modified_base 20^21: mod_base = OTHER; note = phosphorothioate linkage
  modified_base 21: mod_base = cm
  source 1..21: mol_type = other RNA
ttagcatttatctgagtttcc

SEQ ID NO: 630 - RNA, 21 nt, synthetic construct
  modified_base 1: mod_base = OTHER; note = 5'-cyclopropyl phosphonate-2'-O-methyluridine
  modified_base 1^2: mod_base = OTHER; note = phosphorothioate linkage
  modified_base 2: mod_base = OTHER; note = 2'-deoxythymidine
  modified_base 2^3: mod_base = OTHER; note = phosphorothioate linkage
  modified_base 3: mod_base = OTHER; note = 2'-O-methyladenosine
  modified_base 4: mod_base = gm
  modified_base 5: mod_base = cm
  modified_base 6: mod_base = OTHER; note = 2'-O-methyladenosine
  modified_base 7: mod_base = um
  modified_base 8: mod_base = um
  modified_base 9: mod_base = OTHER; note = 2'-deoxythymidine
  modified_base 10: mod_base = OTHER; note = 2'-O-methyladenosine
  modified_base 11: mod_base = um
  modified_base 12: mod_base = OTHER; note = 2'-fluorocytidine
  modified_base 13: mod_base = um
  modified_base 14: mod_base = OTHER; note = 2'-fluoroguanosine
  modified_base 15: mod_base = OTHER; note = 2'-O-methyladenosine
  modified_base 16: mod_base = OTHER; note = 2'-deoxyguanosine
  modified_base 17: mod_base = um
  modified_base 18: mod_base = um
  modified_base 19: mod_base = um
  modified_base 20: mod_base = cm
  modified_base 20^21: mod_base = OTHER; note = phosphorothioate linkage
  modified_base 21: mod_base = cm
  source 1..21: mol_type = other RNA
ttagcatttatctgagtttcc

SEQ ID NO: 631 - RNA, 21 nt, synthetic construct
  modified_base 1: mod_base = OTHER; note = 5'-cyclopropyl phosphonate-2'-O-methyluridine
  modified_base 1^2: mod_base = OTHER; note = phosphorothioate linkage
  modified_base 2: mod_base = OTHER; note = 2'-fluoroadenosine
  modified_base 2^3: mod_base = OTHER; note = phosphorothioate linkage
  modified_base 3: mod_base = cm
  modified_base 4: mod_base = OTHER; note = 2'-fluoroadenosine
  modified_base 5: mod_base = um
  modified_base 6: mod_base = OTHER; note = 2'-fluorouridine
  modified_base 7: mod_base = um
  modified_base 8: mod_base = OTHER; note = 2'-fluoroadenosine
  modified_base 9: mod_base = um
  modified_base 10: mod_base = OTHER; note = 2'-fluorouridine
  modified_base 11: mod_base = gm
  modified_base 12: mod_base = OTHER; note = 2'-fluoroguanosine
  modified_base 13: mod_base = um
  modified_base 14: mod_base = OTHER; note = 2'-fluorouridine
  modified_base 15: mod_base = gm
  modified_base 16: mod_base = OTHER; note = 2'-fluorouridine
  modified_base 17: mod_base = gm
  modified_base 18: mod_base = OTHER; note = 2'-fluoroadenosine
  modified_base 19: mod_base = cm
  modified_base 20: mod_base = OTHER; note = 2'-fluorouridine
  modified_base 20^21: mod_base = OTHER; note = phosphorothioate linkage
  modified_base 21: mod_base = um
  source 1..21: mol_type = other RNA
tacatttattggttgtgactt

SEQ ID NO: 632 - RNA, 21 nt, synthetic construct
  modified_base 1: mod_base = OTHER; note = 5'-cyclopropyl phosphonate-2'-O-methyladenosine
  modified_base 1^2: mod_base = OTHER; note = phosphorothioate linkage
  modified_base 2: mod_base = OTHER; note = 2'-fluoroguanosine
  modified_base 2^3: mod_base = OTHER; note = phosphorothioate linkage
  modified_base 3: mod_base = OTHER; note = 2'-O-methyladenosine
  modified_base 4: mod_base = cm
  modified_base 5: mod_base = OTHER; note = 2'-fluoroadenosine
  modified_base 6: mod_base = OTHER; note = 2'-fluorouridine
  modified_base 7: mod_base = um
  modified_base 8: mod_base = um
  modified_base 9: mod_base = OTHER; note = 2'-O-methyladenosine
  modified_base 10: mod_base = um
  modified_base 11: mod_base = um
  modified_base 12: mod_base = OTHER; note = 2'-fluoroguanosine
  modified_base 13: mod_base = gm
  modified_base 14: mod_base = OTHER; note = 2'-fluorouridine
  modified_base 15: mod_base = um
  modified_base 16: mod_base = OTHER; note = 2'-fluoroguanosine
  modified_base 17: mod_base = um
  modified_base 18: mod_base = gm
  modified_base 19: mod_base = OTHER; note = 2'-O-methyladenosine
  modified_base 20: mod_base = cm
  modified_base 20^21: mod_base = OTHER; note = phosphorothioate linkage
  modified_base 21: mod_base = um
  source 1..21: mol_type = other RNA
agacatttattggttgtgact

SEQ ID NO: 633 - RNA, 21 nt, synthetic construct
  modified_base 1: mod_base = OTHER; note = 5'-cyclopropyl phosphonate-2'-O-methyladenosine
  modified_base 1^2: mod_base = OTHER; note = phosphorothioate linkage
  modified_base 2: mod_base = OTHER; note = 2'-fluoroguanosine
  modified_base 2^3: mod_base = OTHER; note = phosphorothioate linkage
  modified_base 3: mod_base = OTHER; note = 2'-O-methyladenosine
  modified_base 4: mod_base = cm
  modified_base 5: mod_base = OTHER; note = 2'-fluoroadenosine
  modified_base 6: mod_base = OTHER; note = 2'-fluorouridine
  modified_base 7: mod_base = um
  modified_base 8: mod_base = um
  modified_base 9: mod_base = OTHER; note = 2'-O-methyladenosine
  modified_base 10: mod_base = um
  modified_base 11: mod_base = um
  modified_base 12: mod_base = OTHER; note = 2'-fluoroguanosine
  modified_base 13: mod_base = gm
  modified_base 14: mod_base = OTHER; note = 2'-fluorouridine
  modified_base 15: mod_base = um
  modified_base 16: mod_base = gm
  modified_base 17: mod_base = um
  modified_base 18: mod_base = gm
  modified_base 19: mod_base = OTHER; note = 2'-O-methyladenosine
  modified_base 20: mod_base = cm
  modified_base 20^21: mod_base = OTHER; note = phosphorothioate linkage
  modified_base 21: mod_base = um
  source 1..21: mol_type = other RNA
agacatttattggttgtgact

SEQ ID NO: 634 - RNA, 21 nt, synthetic construct
  modified_base 1: mod_base = OTHER; note = 5'-cyclopropyl phosphonate-2'-O-methyladenosine
  modified_base 1^2: mod_base = OTHER; note = phosphorothioate linkage
  modified_base 2: mod_base = OTHER; note = 2'-fluoroguanosine
  modified_base 2^3: mod_base = OTHER; note = phosphorothioate linkage
  modified_base 3: mod_base = OTHER; note = 2'-O-methyladenosine
  modified_base 4: mod_base = cm
  modified_base 5: mod_base = OTHER; note = 2'-fluoroadenosine
  modified_base 6: mod_base = um
  modified_base 7: mod_base = um
  modified_base 8: mod_base = um
  modified_base 9: mod_base = OTHER; note = 2'-O-methyladenosine
  modified_base 10: mod_base = um
  modified_base 11: mod_base = um
  modified_base 12: mod_base = OTHER; note = 2'-fluoroguanosine
  modified_base 13: mod_base = gm
  modified_base 14: mod_base = OTHER; note = 2'-fluorouridine
  modified_base 15: mod_base = um
  modified_base 16: mod_base = OTHER; note = 2'-fluoroguanosine
  modified_base 17: mod_base = um
  modified_base 18: mod_base = gm
  modified_base 19: mod_base = OTHER; note = 2'-O-methyladenosine
  modified_base 20: mod_base = cm
  modified_base 20^21: mod_base = OTHER; note = phosphorothioate linkage
  modified_base 21: mod_base = um
  source 1..21: mol_type = other RNA
agacatttattggttgtgact

SEQ ID NO: 635 - RNA, 21 nt, synthetic construct
  modified_base 1: mod_base = OTHER; note = 5'-cyclopropyl phosphonate-2'-O-methyluridine
  modified_base 1^2: mod_base = OTHER; note = phosphorothioate linkage
  modified_base 2: mod_base = OTHER; note = 2'-fluorouridine
  modified_base 2^3: mod_base = OTHER; note = phosphorothioate linkage
  modified_base 3: mod_base = OTHER; note = 2'-O-methyladenosine
  modified_base 4: mod_base = gm
  modified_base 5: mod_base = OTHER; note = 2'-fluorocytidine
  modified_base 6: mod_base = OTHER; note = 2'-fluoroadenosine
  modified_base 7: mod_base = um
  modified_base 8: mod_base = um
  modified_base 9: mod_base = OTHER; note = 2'-fluorouridine
  modified_base 10: mod_base = OTHER; note = 2'-O-methyladenosine
  modified_base 11: mod_base = um
  modified_base 12: mod_base = OTHER; note = 2'-fluorocytidine
  modified_base 13: mod_base = um
  modified_base 14: mod_base = OTHER; note = 2'-fluoroguanosine
  modified_base 15: mod_base = OTHER; note = 2'-O-methyladenosine
  modified_base 16: mod_base = OTHER; note = 2'-fluoroguanosine
  modified_base 17: mod_base = um
  modified_base 18: mod_base = um
  modified_base 19: mod_base = um
  modified_base 20: mod_base = cm
  modified_base 20^21: mod_base = OTHER; note = phosphorothioate linkage
  modified_base 21: mod_base = cm
  source 1..21: mol_type = other RNA
ttagcatttatctgagtttcc

SEQ ID NO: 636 - RNA, 21 nt, synthetic construct
  modified_base 1: mod_base = OTHER; note = 5'-cyclopropyl phosphonate-2'-O-methyladenosine
  modified_base 1^2: mod_base = OTHER; note = phosphorothioate linkage
  modified_base 2: mod_base = OTHER; note = 2'-fluoroguanosine
  modified_base 2^3: mod_base = OTHER; note = phosphorothioate linkage
  modified_base 3: mod_base = OTHER; note = 2'-O-methyladenosine
  modified_base 4: mod_base = OTHER; note = 2'-fluorocytidine
  modified_base 5: mod_base = OTHER; note = 2'-O-methyladenosine
  modified_base 6: mod_base = OTHER; note = 2'-fluorouridine
  modified_base 7: mod_base = um
  modified_base 8: mod_base = OTHER; note = 2'-fluorouridine
  modified_base 9: mod_base = OTHER; note = 2'-O-methyladenosine
  modified_base 10: mod_base = OTHER; note = 2'-fluorouridine
  modified_base 11: mod_base = um
  modified_base 12: mod_base = OTHER; note = 2'-fluoroguanosine
  modified_base 13: mod_base = gm
  modified_base 14: mod_base = OTHER; note = 2'-fluorouridine
  modified_base 15: mod_base = um
  modified_base 16: mod_base = OTHER; note = 2'-fluoroguanosine
  modified_base 17: mod_base = um
  modified_base 18: mod_base = OTHER; note = 2'-fluoroguanosine
  modified_base 19: mod_base = OTHER; note = 2'-O-methyladenosine
  modified_base 20: mod_base = OTHER; note = 2'-fluorocytidine
  modified_base 20^21: mod_base = OTHER; note = phosphorothioate linkage
  modified_base 21: mod_base = cm
  source 1..21: mol_type = other RNA
agacatttattggttgtgacc

SEQ ID NO: 637 - RNA, 21 nt, synthetic construct
  modified_base 1: mod_base = OTHER; note = 5'-cyclopropyl phosphonate-2'-O-methyluridine
  modified_base 1^2: mod_base = OTHER; note = phosphorothioate linkage
  modified_base 2: mod_base = OTHER; note = 2'-fluoroguanosine
  modified_base 2^3: mod_base = OTHER; note = phosphorothioate linkage
  modified_base 3: mod_base = OTHER; note = 2'-O-methyladenosine
  modified_base 4: mod_base = OTHER; note = 2'-fluorocytidine
  modified_base 5: mod_base = OTHER; note = 2'-O-methyladenosine
  modified_base 6: mod_base = OTHER; note = 2'-fluorouridine
  modified_base 7: mod_base = um
  modified_base 8: mod_base = OTHER; note = 2'-fluorouridine
  modified_base 9: mod_base = OTHER; note = 2'-O-methyladenosine
  modified_base 10: mod_base = OTHER; note = 2'-fluorouridine
  modified_base 11: mod_base = um
  modified_base 12: mod_base = OTHER; note = 2'-fluoroguanosine
  modified_base 13: mod_base = gm
  modified_base 14: mod_base = OTHER; note = 2'-fluorouridine
  modified_base 15: mod_base = um
  modified_base 16: mod_base = OTHER; note = 2'-fluoroguanosine
  modified_base 17: mod_base = um
  modified_base 18: mod_base = OTHER; note = 2'-fluoroguanosine
  modified_base 19: mod_base = OTHER; note = 2'-O-methyladenosine
  modified_base 20: mod_base = OTHER; note = 2'-fluorocytidine
  modified_base 20^21: mod_base = OTHER; note = phosphorothioate linkage
  modified_base 21: mod_base = cm
  source 1..21: mol_type = other RNA
tgacatttattggttgtgacc

SEQ ID NO: 638 - RNA, 21 nt, synthetic construct
  modified_base 1: mod_base = OTHER; note = 5'-cyclopropyl phosphonate-2'-O-methyluridine
  modified_base 1^2: mod_base = OTHER; note = phosphorothioate linkage
  modified_base 2: mod_base = OTHER; note = 2'-fluoroguanosine
  modified_base 2^3: mod_base = OTHER; note = phosphorothioate linkage
  modified_base 3: mod_base = OTHER; note = 2'-O-methyladenosine
  modified_base 4: mod_base = OTHER; note = 2'-fluorocytidine
  modified_base 5: mod_base = OTHER; note = 2'-O-methyladenosine
  modified_base 6: mod_base = OTHER; note = 2'-fluorouridine
  modified_base 7: mod_base = um
  modified_base 8: mod_base = OTHER; note = 2'-fluorouridine
  modified_base 9: mod_base = OTHER; note = 2'-O-methyladenosine
  modified_base 10: mod_base = OTHER; note = 2'-fluorouridine
  modified_base 11: mod_base = um
  modified_base 12: mod_base = OTHER; note = 2'-fluoroguanosine
  modified_base 13: mod_base = gm
  modified_base 14: mod_base = OTHER; note = 2'-fluorouridine
  modified_base 15: mod_base = um
  modified_base 16: mod_base = OTHER; note = 2'-fluoroguanosine
  modified_base 17: mod_base = um
  modified_base 18: mod_base = OTHER; note = 2'-fluoroguanosine
  modified_base 19: mod_base = OTHER; note = 2'-O-methyladenosine
  modified_base 20: mod_base = OTHER; note = 2'-fluorocytidine
  modified_base 20^21: mod_base = OTHER; note = phosphorothioate linkage
  modified_base 21: mod_base = um
  source 1..21: mol_type = other RNA
tgacatttattggttgtgact

SEQ ID NO: 639 - RNA, 21 nt, synthetic construct
  modified_base 1: mod_base = OTHER; note = 5'-cyclopropyl phosphonate-2'-O-methyluridine
  modified_base 1^2: mod_base = OTHER; note = phosphorothioate linkage
  modified_base 2: mod_base = OTHER; note = 2'-fluoroguanosine
  modified_base 2^3: mod_base = OTHER; note = phosphorothioate linkage
  modified_base 3: mod_base = OTHER; note = 2'-O-methyladenosine
  modified_base 4: mod_base = cm
  modified_base 5: mod_base = OTHER; note = 2'-O-methyladenosine
  modified_base 6: mod_base = um
  modified_base 7: mod_base = um
  modified_base 8: mod_base = um
  modified_base 9: mod_base = OTHER; note = 2'-O-methyladenosine
  modified_base 10: mod_base = OTHER; note = 2'-fluorouridine
  modified_base 11: mod_base = um
  modified_base 12: mod_base = OTHER; note = 2'-fluoroguanosine
  modified_base 13: mod_base = gm
  modified_base 14: mod_base = OTHER; note = 2'-fluorouridine
  modified_base 15: mod_base = um
  modified_base 16: mod_base = OTHER; note = 2'-fluoroguanosine
  modified_base 17: mod_base = um
  modified_base 18: mod_base = gm
  modified_base 19: mod_base = OTHER; note = 2'-O-methyladenosine
  modified_base 20: mod_base = cm
  modified_base 20^21: mod_base = OTHER; note = phosphorothioate linkage
  modified_base 21: mod_base = um
  source 1..21: mol_type = other RNA
tgacatttattggttgtgact

SEQ ID NO: 640 - RNA, 21 nt, synthetic construct
  modified_base 1: mod_base = OTHER; note = 5'-cyclopropyl phosphonate-2'-O-methyluridine
  modified_base 1^2: mod_base = OTHER; note = phosphorothioate linkage
  modified_base 2: mod_base = OTHER; note = 2'-fluoroguanosine
  modified_base 2^3: mod_base = OTHER; note = phosphorothioate linkage
  modified_base 3: mod_base = OTHER; note = 2'-O-methyladenosine
  modified_base 4: mod_base = cm
  modified_base 5: mod_base = OTHER; note = 2'-O-methyladenosine
  modified_base 6: mod_base = um
  modified_base 7: mod_base = OTHER; note = 2'-fluorouridine
  modified_base 8: mod_base = um
  modified_base 9: mod_base = OTHER; note = 2'-O-methyladenosine
  modified_base 10: mod_base = um
  modified_base 11: mod_base = um
  modified_base 12: mod_base = OTHER; note = 2'-fluoroguanosine
  modified_base 13: mod_base = gm
  modified_base 14: mod_base = OTHER; note = 2'-fluorouridine
  modified_base 15: mod_base = um
  modified_base 16: mod_base = OTHER; note = 2'-fluoroguanosine
  modified_base 17: mod_base = um
  modified_base 18: mod_base = gm
  modified_base 19: mod_base = OTHER; note = 2'-O-methyladenosine
  modified_base 20: mod_base = cm
  modified_base 20^21: mod_base = OTHER; note = phosphorothioate linkage
  modified_base 21: mod_base = um
  source 1..21: mol_type = other RNA
tgacatttattggttgtgact

SEQ ID NO: 641 - RNA, 21 nt, synthetic construct
  modified_base 1: mod_base = OTHER; note = 5'-cyclopropyl phosphonate-2'-O-methyladenosine
  modified_base 1^2: mod_base = OTHER; note = phosphorothioate linkage
  modified_base 2: mod_base = OTHER; note = 2'-fluoroguanosine
  modified_base 2^3: mod_base = OTHER; note = phosphorothioate linkage
  modified_base 3: mod_base = OTHER; note = 2'-O-methyladenosine
  modified_base 4: mod_base = cm
  modified_base 5: mod_base = OTHER; note = 2'-O-methyladenosine
  modified_base 6: mod_base = um
  modified_base 7: mod_base = um
  modified_base 8: mod_base = um
  modified_base 9: mod_base = OTHER; note = 2'-O-methyladenosine
  modified_base 10: mod_base = OTHER; note = 2'-fluorouridine
  modified_base 11: mod_base = um
  modified_base 12: mod_base = OTHER; note = 2'-fluoroguanosine
  modified_base 13: mod_base = gm
  modified_base 14: mod_base = OTHER; note = 2'-fluorouridine
  modified_base 15: mod_base = um
  modified_base 16: mod_base = OTHER; note = 2'-fluoroguanosine
  modified_base 17: mod_base = um
  modified_base 18: mod_base = gm
  modified_base 19: mod_base = OTHER; note = 2'-O-methyladenosine
  modified_base 20: mod_base = cm
  modified_base 20^21: mod_base = OTHER; note = phosphorothioate linkage
  modified_base 21: mod_base = um
  source 1..21: mol_type = other RNA
agacatttattggttgtgact

SEQ ID NO: 642 - RNA, 21 nt, synthetic construct
  modified_base 1: mod_base = OTHER; note = 5'-cyclopropyl phosphonate-2'-O-methyluridine
  modified_base 1^2: mod_base = OTHER; note = phosphorothioate linkage
  modified_base 2: mod_base = OTHER; note = 2'-fluorouridine
  modified_base 2^3: mod_base = OTHER; note = phosphorothioate linkage
  modified_base 3: mod_base = OTHER; note = 2'-O-methyladenosine
  modified_base 4: mod_base = gm
  modified_base 5: mod_base = OTHER; note = 2'-fluorocytidine
  modified_base 6: mod_base = OTHER; note = 2'-O-methyladenosine
  modified_base 7: mod_base = um
  modified_base 8: mod_base = um
  modified_base 9: mod_base = OTHER; note = 2'-fluorouridine
  modified_base 10: mod_base = OTHER; note = 2'-O-methyladenosine
  modified_base 11: mod_base = um
  modified_base 12: mod_base = OTHER; note = 2'-fluorocytidine
  modified_base 13: mod_base = um
  modified_base 14: mod_base = OTHER; note = 2'-fluoroguanosine
  modified_base 15: mod_base = OTHER; note = 2'-O-methyladenosine
  modified_base 16: mod_base = gm
  modified_base 17: mod_base = um
  modified_base 18: mod_base = um
  modified_base 19: mod_base = um
  modified_base 20: mod_base = cm
  modified_base 20^21: mod_base = OTHER; note = phosphorothioate linkage
  modified_base 21: mod_base = cm
  source 1..21: mol_type = other RNA
ttagcatttatctgagtttcc

SEQ ID NO: 643 - RNA, 21 nt, synthetic construct
  modified_base 1: mod_base = OTHER; note = 5'-cyclopropyl phosphonate-2'-O-methyluridine
  modified_base 1^2: mod_base = OTHER; note = phosphorothioate linkage
  modified_base 2: mod_base = OTHER; note = 2'-fluoroadenosine
  modified_base 2^3: mod_base = OTHER; note = phosphorothioate linkage
  modified_base 3: mod_base = cm
  modified_base 4: mod_base = OTHER; note = 2'-O-methyladenosine
  modified_base 5: mod_base = um
  modified_base 6: mod_base = um
  modified_base 7: mod_base = um
  modified_base 8: mod_base = OTHER; note = 2'-O-methyladenosine
  modified_base 9: mod_base = um
  modified_base 10: mod_base = OTHER; note = 2'-fluorouridine
  modified_base 11: mod_base = gm
  modified_base 12: mod_base = OTHER; note = 2'-fluoroguanosine
  modified_base 13: mod_base = um
  modified_base 14: mod_base = OTHER; note = 2'-fluorouridine
  modified_base 15: mod_base = gm
  modified_base 16: mod_base = OTHER; note = 2'-fluorouridine
  modified_base 17: mod_base = gm
  modified_base 18: mod_base = OTHER; note = 2'-O-methyladenosine
  modified_base 19: mod_base = cm
  modified_base 20: mod_base = um
  modified_base 20^21: mod_base = OTHER; note = phosphorothioate linkage
  modified_base 21: mod_base = um
  source 1..21: mol_type = other RNA
tacatttattggttgtgactt

SEQ ID NO: 644 - RNA, 21 nt, synthetic construct
  modified_base 1: mod_base = OTHER; note = 5'-cyclopropyl phosphonate-2'-O-methyluridine
  modified_base 1^2: mod_base = OTHER; note = phosphorothioate linkage
  modified_base 2: mod_base = OTHER; note = 2'-fluoroadenosine
  modified_base 2^3: mod_base = OTHER; note = phosphorothioate linkage
  modified_base 3: mod_base = cm
  modified_base 4: mod_base = OTHER; note = 2'-O-methyladenosine
  modified_base 5: mod_base = OTHER; note = 2'-fluorouridine
  modified_base 6: mod_base = OTHER; note = 2'-fluorouridine
  modified_base 7: mod_base = um
  modified_base 8: mod_base = OTHER; note = 2'-O-methyladenosine
  modified_base 9: mod_base = OTHER; note = 2'-fluorouridine
  modified_base 10: mod_base = um
  modified_base 11: mod_base = gm
  modified_base 12: mod_base = OTHER; note = 2'-fluoroguanosine
  modified_base 13: mod_base = um
  modified_base 14: mod_base = OTHER; note = 2'-fluorouridine
  modified_base 15: mod_base = gm
  modified_base 16: mod_base = OTHER; note = 2'-fluorouridine
  modified_base 17: mod_base = gm
  modified_base 18: mod_base = OTHER; note = 2'-O-methyladenosine
  modified_base 19: mod_base = cm
  modified_base 20: mod_base = um
  modified_base 20^21: mod_base = OTHER; note = phosphorothioate linkage
  modified_base 21: mod_base = um
  source 1..21: mol_type = other RNA
tacatttattggttgtgactt

SEQ ID NO: 645 - RNA, 21 nt, synthetic construct
  modified_base 1: mod_base = OTHER; note = 5'-cyclopropyl phosphonate-2'-O-methyluridine
  modified_base 1^2: mod_base = OTHER; note = phosphorothioate linkage
  modified_base 2: mod_base = OTHER; note = 2'-fluoroadenosine
  modified_base 2^3: mod_base = OTHER; note = phosphorothioate linkage
  modified_base 3: mod_base = cm
  modified_base 4: mod_base = OTHER; note = 2'-O-methyladenosine
  modified_base 5: mod_base = um
  modified_base 6: mod_base = um
  modified_base 7: mod_base = OTHER; note = 2'-fluorouridine
  modified_base 8: mod_base = OTHER; note = 2'-O-methyladenosine
  modified_base 9: mod_base = um
  modified_base 10: mod_base = um
  modified_base 11: mod_base = gm
  modified_base 12: mod_base = OTHER; note = 2'-fluoroguanosine
  modified_base 13: mod_base = um
  modified_base 14: mod_base = OTHER; note = 2'-fluorouridine
  modified_base 15: mod_base = gm
  modified_base 16: mod_base = OTHER; note = 2'-fluorouridine
  modified_base 17: mod_base = gm
  modified_base 18: mod_base = OTHER; note = 2'-O-methyladenosine
  modified_base 19: mod_base = cm
  modified_base 20: mod_base = um
  modified_base 20^21: mod_base = OTHER; note = phosphorothioate linkage
  modified_base 21: mod_base = um
  source 1..21: mol_type = other RNA
tacatttattggttgtgactt

SEQ ID NO: 646 - RNA, 21 nt, synthetic construct
  modified_base 1: mod_base = OTHER; note = 5'-cyclopropyl phosphonate-2'-O-methyluridine
  modified_base 1^2: mod_base = OTHER; note = phosphorothioate linkage
  modified_base 2: mod_base = OTHER; note = 2'-fluoroguanosine
  modified_base 2^3: mod_base = OTHER; note = phosphorothioate linkage
  modified_base 3: mod_base = OTHER; note = 2'-O-methyladenosine
  modified_base 4: mod_base = cm
  modified_base 5: mod_base = OTHER; note = 2'-O-methyladenosine
  modified_base 6: mod_base = um
  modified_base 7: mod_base = OTHER; note = 2'-fluorouridine
  modified_base 8: mod_base = um
  modified_base 9: mod_base = OTHER; note = 2'-O-methyladenosine
  modified_base 10: mod_base = um
  modified_base 11: mod_base = um
  modified_base 12: mod_base = OTHER; note = 2'-fluoroguanosine
  modified_base 13: mod_base = gm
  modified_base 14: mod_base = OTHER; note = 2'-fluorouridine
  modified_base 15: mod_base = um
  modified_base 16: mod_base = OTHER; note = 2'-fluoroguanosine
  modified_base 17: mod_base = um
  modified_base 18: mod_base = gm
  modified_base 19: mod_base = OTHER; note = 2'-O-methyladenosine
  modified_base 20: mod_base = cm
  modified_base 20^21: mod_base = OTHER; note = phosphorothioate linkage
  modified_base 21: mod_base = cm
  source 1..21: mol_type = other RNA
tgacatttattggttgtgacc

SEQ ID NO: 647 - RNA, 21 nt, synthetic construct
  modified_base 1: mod_base = OTHER; note = 5'-cyclopropyl phosphonate-2'-O-methyladenosine
  modified_base 1^2: mod_base = OTHER; note = phosphorothioate linkage
  modified_base 2: mod_base = OTHER; note = 2'-fluoroguanosine
  modified_base 2^3: mod_base = OTHER; note = phosphorothioate linkage
  modified_base 3: mod_base = OTHER; note = 2'-O-methyladenosine
  modified_base 4: mod_base = cm
  modified_base 5: mod_base = OTHER; note = 2'-O-methyladenosine
  modified_base 6: mod_base = um
  modified_base 7: mod_base = OTHER; note = 2'-fluorouridine
  modified_base 8: mod_base = um
  modified_base 9: mod_base = OTHER; note = 2'-O-methyladenosine
  modified_base 10: mod_base = um
  modified_base 11: mod_base = um
  modified_base 12: mod_base = OTHER; note = 2'-fluoroguanosine
  modified_base 13: mod_base = gm
  modified_base 14: mod_base = OTHER; note = 2'-fluorouridine
  modified_base 15: mod_base = um
  modified_base 16: mod_base = OTHER; note = 2'-fluoroguanosine
  modified_base 17: mod_base = um
  modified_base 18: mod_base = gm
  modified_base 19: mod_base = OTHER; note = 2'-O-methyladenosine
  modified_base 20: mod_base = cm
  modified_base 20^21: mod_base = OTHER; note = phosphorothioate linkage
  modified_base 21: mod_base = cm
  source 1..21: mol_type = other RNA
agacatttattggttgtgacc

SEQ ID NO: 648 - RNA, 21 nt, synthetic construct
  modified_base 1: mod_base = OTHER; note = 5'-cyclopropyl phosphonate-2'-O-methyluridine
  modified_base 1^2: mod_base = OTHER; note = phosphorothioate linkage
  modified_base 2: mod_base = OTHER; note = 2'-fluoroguanosine
  modified_base 2^3: mod_base = OTHER; note = phosphorothioate linkage
  modified_base 3: mod_base = OTHER; note = 2'-O-methyladenosine
  modified_base 4: mod_base = cm
  modified_base 5: mod_base = OTHER; note = 2'-O-methyladenosine
  modified_base 6: mod_base = um
  modified_base 7: mod_base = um
  modified_base 8: mod_base = um
  modified_base 9: mod_base = OTHER; note = 2'-O-methyladenosine
  modified_base 10: mod_base = OTHER; note = 2'-fluorouridine
  modified_base 11: mod_base = um
  modified_base 12: mod_base = OTHER; note = 2'-fluoroguanosine
  modified_base 13: mod_base = gm
  modified_base 14: mod_base = OTHER; note = 2'-fluorouridine
  modified_base 15: mod_base = um
  modified_base 16: mod_base = OTHER; note = 2'-fluoroguanosine
  modified_base 17: mod_base = um
  modified_base 18: mod_base = gm
  modified_base 19: mod_base = OTHER; note = 2'-O-methyladenosine
  modified_base 20: mod_base = cm
  modified_base 20^21: mod_base = OTHER; note = phosphorothioate linkage
  modified_base 21: mod_base = cm
  source 1..21: mol_type = other RNA
tgacatttattggttgtgacc

SEQ ID NO: 649 - RNA, 21 nt, synthetic construct
  modified_base 1: mod_base = OTHER; note = 5'-cyclopropyl phosphonate-2'-O-methyladenosine
  modified_base 1^2: mod_base = OTHER; note = phosphorothioate linkage
  modified_base 2: mod_base = OTHER; note = 2'-fluoroguanosine
  modified_base 2^3: mod_base = OTHER; note = phosphorothioate linkage
  modified_base 3: mod_base = OTHER; note = 2'-O-methyladenosine
  modified_base 4: mod_base = cm
  modified_base 5: mod_base = OTHER; note = 2'-O-methyladenosine
  modified_base 6: mod_base = um
  modified_base 7: mod_base = um
  modified_base 8: mod_base = um
  modified_base 9: mod_base = OTHER; note = 2'-O-methyladenosine
  modified_base 10: mod_base = OTHER; note = 2'-fluorouridine
  modified_base 11: mod_base = um
  modified_base 12: mod_base = OTHER; note = 2'-fluoroguanosine
  modified_base 13: mod_base = gm
  modified_base 14: mod_base = OTHER; note = 2'-fluorouridine
  modified_base 15: mod_base = um
  modified_base 16: mod_base = OTHER; note = 2'-fluoroguanosine
  modified_base 17: mod_base = um
  modified_base 18: mod_base = gm
  modified_base 19: mod_base = OTHER; note = 2'-O-methyladenosine
  modified_base 20: mod_base = cm
  modified_base 20^21: mod_base = OTHER; note = phosphorothioate linkage
  modified_base 21: mod_base = cm
  source 1..21: mol_type = other RNA
agacatttattggttgtgacc

SEQ ID NO: 650 - RNA, 21 nt, synthetic construct
  modified_base 1: mod_base = OTHER; note = 5'-cyclopropyl phosphonate-2'-O-methyluridine
  modified_base 2: mod_base = OTHER; note = 2'-fluoroguanosine
  modified_base 3: mod_base = OTHER; note = 2'-O-methyladenosine
  modified_base 4: mod_base = cm
  modified_base 5: mod_base = OTHER; note = 2'-O-methyladenosine
  modified_base 6: mod_base = um
  modified_base 7: mod_base = um
  modified_base 8: mod_base = um
  modified_base 9: mod_base = OTHER; note = 2'-O-methyladenosine
  modified_base 10: mod_base = OTHER; note = 2'-fluorouridine
  modified_base 11: mod_base = um
  modified_base 12: mod_base = OTHER; note = 2'-fluoroguanosine
  modified_base 13: mod_base = gm
  modified_base 14: mod_base = OTHER; note = 2'-fluorouridine
  modified_base 15: mod_base = um
  modified_base 16: mod_base = OTHER; note = 2'-fluoroguanosine
  modified_base 17: mod_base = um
  modified_base 18: mod_base = gm
  modified_base 19: mod_base = OTHER; note = 2'-O-methyladenosine
  modified_base 20: mod_base = cm
  modified_base 20^21: mod_base = OTHER; note = phosphorothioate linkage
  modified_base 21: mod_base = um
  source 1..21: mol_type = other RNA
tgacatttattggttgtgact

SEQ ID NO: 651 - RNA, 21 nt, synthetic construct
  modified_base 1: mod_base = OTHER; note = 5'-cyclopropyl phosphonate-2'-O-methyluridine
  modified_base 2: mod_base = OTHER; note = 2'-fluoroguanosine
  modified_base 3: mod_base = OTHER; note = 2'-O-methyladenosine
  modified_base 4: mod_base = cm
  modified_base 5: mod_base = OTHER; note = 2'-O-methyladenosine
  modified_base 6: mod_base = um
  modified_base 7: mod_base = um
  modified_base 8: mod_base = um
  modified_base 9: mod_base = OTHER; note = 2'-O-methyladenosine
  modified_base 10: mod_base = OTHER; note = 2'-fluorouridine
  modified_base 11: mod_base = um
  modified_base 12: mod_base = OTHER; note = 2'-fluoroguanosine
  modified_base 13: mod_base = gm
  modified_base 14: mod_base = OTHER; note = 2'-fluorouridine
  modified_base 15: mod_base = um
  modified_base 16: mod_base = OTHER; note = 2'-fluoroguanosine
  modified_base 17: mod_base = um
  modified_base 18: mod_base = gm
  modified_base 19: mod_base = OTHER; note = 2'-O-methyladenosine
  modified_base 20: mod_base = cm
  modified_base 20^21: mod_base = OTHER; note = phosphorothioate linkage
  modified_base 21: mod_base = cm
  source 1..21: mol_type = other RNA
tgacatttattggttgtgacc

SEQ ID NO: 652 - RNA, 21 nt, synthetic construct
  modified_base 1: mod_base = OTHER; note = 2'-O-methyladenosine
  modified_base 1^2: mod_base = OTHER; note = phosphorothioate linkage
  modified_base 2: mod_base = OTHER; note = 2'-fluoroguanosine
  modified_base 2^3: mod_base = OTHER; note = phosphorothioate linkage
  modified_base 3: mod_base = OTHER; note = 2'-O-methyladenosine
  modified_base 4: mod_base = cm
  modified_base 5: mod_base = OTHER; note = 2'-O-methyladenosine
  modified_base 6: mod_base = um
  modified_base 7: mod_base = um
  modified_base 8: mod_base = um
  modified_base 9: mod_base = OTHER; note = 2'-O-methyladenosine
  modified_base 10: mod_base = OTHER; note = 2'-fluorouridine
  modified_base 11: mod_base = um
  modified_base 12: mod_base = OTHER; note = 2'-fluoroguanosine
  modified_base 13: mod_base = gm
  modified_base 14: mod_base = OTHER; note = 2'-fluorouridine
  modified_base 15: mod_base = um
  modified_base 16: mod_base = OTHER; note = 2'-fluoroguanosine
  modified_base 17: mod_base = um
  modified_base 18: mod_base = gm
  modified_base 19: mod_base = OTHER; note = 2'-O-methyladenosine
  modified_base 20: mod_base = cm
  modified_base 20^21: mod_base = OTHER; note = phosphorothioate linkage
  modified_base 21: mod_base = um
  source 1..21: mol_type = other RNA
agacatttattggttgtgact

SEQ ID NO: 653 - RNA, 21 nt, synthetic construct
  modified_base 1: mod_base = OTHER; note = 2'-O-methyladenosine
  modified_base 1^2: mod_base = OTHER; note = phosphorothioate linkage
  modified_base 2: mod_base = OTHER; note = 2'-fluoroguanosine
  modified_base 2^3: mod_base = OTHER; note = phosphorothioate linkage
  modified_base 3: mod_base = OTHER; note = 2'-O-methyladenosine
  modified_base 4: mod_base = cm
  modified_base 5: mod_base = OTHER; note = 2'-O-methyladenosine
  modified_base 6: mod_base = um
  modified_base 7: mod_base = um
  modified_base 8: mod_base = um
  modified_base 9: mod_base = OTHER; note = 2'-O-methyladenosine
  modified_base 10: mod_base = OTHER; note = 2'-fluorouridine
  modified_base 11: mod_base = um
  modified_base 12: mod_base = OTHER; note = 2'-fluoroguanosine
  modified_base 13: mod_base = gm
  modified_base 14: mod_base = OTHER; note = 2'-fluorouridine
  modified_base 15: mod_base = um
  modified_base 16: mod_base = OTHER; note = 2'-fluoroguanosine
  modified_base 17: mod_base = um
  modified_base 18: mod_base = gm
  modified_base 19: mod_base = OTHER; note = 2'-O-methyladenosine
  modified_base 20: mod_base = cm
  modified_base 20^21: mod_base = OTHER; note = phosphorothioate linkage
  modified_base 21: mod_base = cm
  source 1..21: mol_type = other RNA
agacatttattggttgtgacc

SEQ ID NO: 654 - RNA, 21 nt, synthetic construct
  modified_base 1: mod_base = OTHER; note = 2'-O-methyladenosine
  modified_base 1^2: mod_base = OTHER; note = phosphorothioate linkage
  modified_base 2: mod_base = OTHER; note = 2'-fluoroguanosine
  modified_base 2^3: mod_base = OTHER; note = phosphorothioate linkage
  modified_base 3: mod_base = OTHER; note = 2'-O-methyladenosine
  modified_base 4: mod_base = cm
  modified_base 5: mod_base = OTHER; note = 2'-O-methyladenosine
  modified_base 6: mod_base = um
  modified_base 7: mod_base = um
  modified_base 8: mod_base = um
  modified_base 9: mod_base = OTHER; note = 2'-fluoroadenosine
  modified_base 10: mod_base = um
  modified_base 11: mod_base = um
  modified_base 12: mod_base = OTHER; note = 2'-fluoroguanosine
  modified_base 13: mod_base = gm
  modified_base 14: mod_base = OTHER; note = 2'-fluorouridine
  modified_base 15: mod_base = um
  modified_base 16: mod_base = OTHER; note = 2'-fluoroguanosine
  modified_base 17: mod_base = um
  modified_base 18: mod_base = gm
  modified_base 19: mod_base = OTHER; note = 2'-O-methyladenosine
  modified_base 20: mod_base = cm
  modified_base 20^21: mod_base = OTHER; note = phosphorothioate linkage
  modified_base 21: mod_base = cm
  source 1..21: mol_type = other RNA
agacatttattggttgtgacc

SEQ ID NO: 655 - RNA, 21 nt, synthetic construct
  modified_base 1: mod_base = OTHER; note = 5'-cyclopropyl phosphonate-2'-O-methyladenosine
  modified_base 1^2: mod_base = OTHER; note = phosphorothioate linkage
  modified_base 2: mod_base = OTHER; note = 2'-fluoroguanosine
  modified_base 2^3: mod_base = OTHER; note = phosphorothioate linkage
  modified_base 3: mod_base = OTHER; note = 2'-O-methyladenosine
  modified_base 4: mod_base = cm
  modified_base 5: mod_base = OTHER; note = 2'-O-methyladenosine
  modified_base 6: mod_base = um
  modified_base 7: mod_base = um
  modified_base 8: mod_base = um
  modified_base 9: mod_base = OTHER; note = 2'-fluoroadenosine
  modified_base 10: mod_base = um
  modified_base 11: mod_base = um
  modified_base 12: mod_base = OTHER; note = 2'-fluoroguanosine
  modified_base 13: mod_base = gm
  modified_base 14: mod_base = OTHER; note = 2'-fluorouridine
  modified_base 15: mod_base = um
  modified_base 16: mod_base = OTHER; note = 2'-fluoroguanosine
  modified_base 17: mod_base = um
  modified_base 18: mod_base = gm
  modified_base 19: mod_base = OTHER; note = 2'-O-methyladenosine
  modified_base 20: mod_base = cm
  modified_base 20^21: mod_base = OTHER; note = phosphorothioate linkage
  modified_base 21: mod_base = cm
  source 1..21: mol_type = other RNA
agacatttattggttgtgacc

SEQ ID NO: 656 - RNA, 21 nt, synthetic construct
  modified_base 1: mod_base = OTHER; note = 5'-cyclopropyl phosphonate-2'-O-methyladenosine
  modified_base 1^2: mod_base = OTHER; note = phosphorothioate linkage
  modified_base 2: mod_base = OTHER; note = 2'-fluoroguanosine
  modified_base 2^3: mod_base = OTHER; note = phosphorothioate linkage
  modified_base 3: mod_base = OTHER; note = 2'-O-methyladenosine
  modified_base 4: mod_base = cm
  modified_base 5: mod_base = OTHER; note = 2'-O-methyladenosine
  modified_base 6: mod_base = um
  modified_base 7: mod_base = OTHER; note = 2 ,3 -seco-uridine
  modified_base 8: mod_base = um
  modified_base 9: mod_base = OTHER; note = 2'-O-methyladenosine
  modified_base 10: mod_base = OTHER; note = 2'-fluorouridine
  modified_base 11: mod_base = um
  modified_base 12: mod_base = OTHER; note = 2'-fluoroguanosine
  modified_base 13: mod_base = gm
  modified_base 14: mod_base = OTHER; note = 2'-fluorouridine
  modified_base 15: mod_base = um
  modified_base 16: mod_base = OTHER; note = 2'-fluoroguanosine
  modified_base 17: mod_base = um
  modified_base 18: mod_base = gm
  modified_base 19: mod_base = OTHER; note = 2'-O-methyladenosine
  modified_base 20: mod_base = cm
  modified_base 20^21: mod_base = OTHER; note = phosphorothioate linkage
  modified_base 21: mod_base = um
  source 1..21: mol_type = other RNA
agacatttattggttgtgact

SEQ ID NO: 657 - RNA, 21 nt, synthetic construct
  modified_base 1: mod_base = OTHER; note = 5'-cyclopropyl phosphonate-2'-O-methyladenosine
  modified_base 1^2: mod_base = OTHER; note = phosphorothioate linkage
  modified_base 2: mod_base = OTHER; note = 2'-fluoroguanosine
  modified_base 2^3: mod_base = OTHER; note = phosphorothioate linkage
  modified_base 3: mod_base = OTHER; note = 2'-O-methyladenosine
  modified_base 4: mod_base = cm
  modified_base 5: mod_base = OTHER; note = 2'-O-methyladenosine
  modified_base 6: mod_base = um
  modified_base 7: mod_base = OTHER; note = 2 ,3 -seco-uridine
  modified_base 8: mod_base = um
  modified_base 9: mod_base = OTHER; note = 2'-O-methyladenosine
  modified_base 10: mod_base = OTHER; note = 2'-fluorouridine
  modified_base 11: mod_base = um
  modified_base 12: mod_base = OTHER; note = 2'-fluoroguanosine
  modified_base 13: mod_base = gm
  modified_base 14: mod_base = OTHER; note = 2'-fluorouridine
  modified_base 15: mod_base = um
  modified_base 16: mod_base = OTHER; note = 2'-fluoroguanosine
  modified_base 17: mod_base = um
  modified_base 18: mod_base = gm
  modified_base 19: mod_base = OTHER; note = 2'-O-methyladenosine
  modified_base 20: mod_base = cm
  modified_base 20^21: mod_base = OTHER; note = phosphorothioate linkage
  modified_base 21: mod_base = cm
  source 1..21: mol_type = other RNA
agacatttattggttgtgacc

SEQ ID NO: 658 - RNA, 21 nt, synthetic construct
  modified_base 1: mod_base = OTHER; note = 5'-cyclopropyl phosphonate-2'-O-methyladenosine
  modified_base 1^2: mod_base = OTHER; note = phosphorothioate linkage
  modified_base 2: mod_base = OTHER; note = 2'-fluoroguanosine
  modified_base 2^3: mod_base = OTHER; note = phosphorothioate linkage
  modified_base 3: mod_base = OTHER; note = 2'-O-methyladenosine
  modified_base 4: mod_base = cm
  modified_base 5: mod_base = OTHER; note = 2'-O-methyladenosine
  modified_base 6: mod_base = um
  modified_base 7: mod_base = OTHER; note = thymine glycol nucleic acid
  modified_base 8: mod_base = um
  modified_base 9: mod_base = OTHER; note = 2'-O-methyladenosine
  modified_base 10: mod_base = OTHER; note = 2'-fluorouridine
  modified_base 11: mod_base = um
  modified_base 12: mod_base = OTHER; note = 2'-fluoroguanosine
  modified_base 13: mod_base = gm
  modified_base 14: mod_base = OTHER; note = 2'-fluorouridine
  modified_base 15: mod_base = um
  modified_base 16: mod_base = OTHER; note = 2'-fluoroguanosine
  modified_base 17: mod_base = um
  modified_base 18: mod_base = gm
  modified_base 19: mod_base = OTHER; note = 2'-O-methyladenosine
  modified_base 20: mod_base = cm
  modified_base 20^21: mod_base = OTHER; note = phosphorothioate linkage
  modified_base 21: mod_base = cm
  source 1..21: mol_type = other RNA
agacatttattggttgtgacc

SEQ ID NO: 659 - RNA, 21 nt, synthetic construct
  modified_base 1: mod_base = OTHER; note = 5'-cyclopropyl phosphonate-2'-O-methyluridine
  modified_base 1^2: mod_base = OTHER; note = phosphorothioate linkage
  modified_base 2: mod_base = OTHER; note = 2'-fluoroadenosine
  modified_base 2^3: mod_base = OTHER; note = phosphorothioate linkage
  modified_base 3: mod_base = cm
  modified_base 4: mod_base = OTHER; note = 2'-O-methyladenosine
  modified_base 5: mod_base = um
  modified_base 6: mod_base = um
  modified_base 7: mod_base = OTHER; note = 2 ,3 -seco-uridine
  modified_base 8: mod_base = OTHER; note = 2'-O-methyladenosine
  modified_base 9: mod_base = um
  modified_base 10: mod_base = OTHER; note = 2'-fluorouridine
  modified_base 11: mod_base = gm
  modified_base 12: mod_base = OTHER; note = 2'-fluoroguanosine
  modified_base 13: mod_base = um
  modified_base 14: mod_base = OTHER; note = 2'-fluorouridine
  modified_base 15: mod_base = gm
  modified_base 16: mod_base = OTHER; note = 2'-fluorouridine
  modified_base 17: mod_base = gm
  modified_base 18: mod_base = OTHER; note = 2'-O-methyladenosine
  modified_base 19: mod_base = cm
  modified_base 20: mod_base = um
  modified_base 20^21: mod_base = OTHER; note = phosphorothioate linkage
  modified_base 21: mod_base = um
  source 1..21: mol_type = other RNA
tacatttattggttgtgactt

SEQ ID NO: 660 - RNA, 21 nt, synthetic construct
  modified_base 1: mod_base = OTHER; note = 5'-cyclopropyl phosphonate-2'-O-methyluridine
  modified_base 1^2: mod_base = OTHER; note = phosphorothioate linkage
  modified_base 2: mod_base = OTHER; note = 2'-fluoroadenosine
  modified_base 2^3: mod_base = OTHER; note = phosphorothioate linkage
  modified_base 3: mod_base = cm
  modified_base 4: mod_base = OTHER; note = 2'-O-methyladenosine
  modified_base 5: mod_base = um
  modified_base 6: mod_base = um
  modified_base 7: mod_base = OTHER; note = 2 ,3 -seco-uridine
  modified_base 8: mod_base = OTHER; note = 2'-O-methyladenosine
  modified_base 9: mod_base = um
  modified_base 10: mod_base = OTHER; note = 2'-fluorouridine
  modified_base 11: mod_base = gm
  modified_base 12: mod_base = OTHER; note = 2'-fluoroguanosine
  modified_base 13: mod_base = um
  modified_base 14: mod_base = OTHER; note = 2'-fluorouridine
  modified_base 15: mod_base = gm
  modified_base 16: mod_base = OTHER; note = 2'-fluorouridine
  modified_base 17: mod_base = gm
  modified_base 18: mod_base = OTHER; note = 2'-O-methyladenosine
  modified_base 19: mod_base = cm
  modified_base 20: mod_base = um
  modified_base 20^21: mod_base = OTHER; note = phosphorothioate linkage
  modified_base 21: mod_base = cm
  source 1..21: mol_type = other RNA
tacatttattggttgtgactc

SEQ ID NO: 661 - RNA, 21 nt, synthetic construct
  modified_base 1: mod_base = OTHER; note = 2'-O-methylinosine
  modified_base 1^2: mod_base = OTHER; note = phosphorothioate linkage
  modified_base 2: mod_base = OTHER; note = 2'-fluoroguanosine
  modified_base 2^3: mod_base = OTHER; note = phosphorothioate linkage
  modified_base 3: mod_base = OTHER; note = 2'-O-methyladenosine
  modified_base 4: mod_base = cm
  modified_base 5: mod_base = OTHER; note = 2'-O-methyladenosine
  modified_base 6: mod_base = um
  modified_base 7: mod_base = um
  modified_base 8: mod_base = um
  modified_base 9: mod_base = OTHER; note = 2'-O-methyladenosine
  modified_base 10: mod_base = OTHER; note = 2'-fluorouridine
  modified_base 11: mod_base = um
  modified_base 12: mod_base = OTHER; note = 2'-fluoroguanosine
  modified_base 13: mod_base = gm
  modified_base 14: mod_base = OTHER; note = 2'-fluorouridine
  modified_base 15: mod_base = um
  modified_base 16: mod_base = OTHER; note = 2'-fluoroguanosine
  modified_base 17: mod_base = um
  modified_base 18: mod_base = gm
  modified_base 19: mod_base = OTHER; note = 2'-O-methyladenosine
  modified_base 20: mod_base = cm
  modified_base 20^21: mod_base = OTHER; note = phosphorothioate linkage
  modified_base 21: mod_base = um
  source 1..21: mol_type = other RNA
ngacatttattggttgtgact

SEQ ID NO: 662 - RNA, 21 nt, synthetic construct
  modified_base 1: mod_base = OTHER; note = 5'-cyclopropyl phosphonate-2'-O-methylinosine
  modified_base 1^2: mod_base = OTHER; note = phosphorothioate linkage
  modified_base 2: mod_base = OTHER; note = 2'-fluoroguanosine
  modified_base 2^3: mod_base = OTHER; note = phosphorothioate linkage
  modified_base 3: mod_base = OTHER; note = 2'-O-methyladenosine
  modified_base 4: mod_base = cm
  modified_base 5: mod_base = OTHER; note = 2'-O-methyladenosine
  modified_base 6: mod_base = um
  modified_base 7: mod_base = um
  modified_base 8: mod_base = um
  modified_base 9: mod_base = OTHER; note = 2'-O-methyladenosine
  modified_base 10: mod_base = OTHER; note = 2'-fluorouridine
  modified_base 11: mod_base = um
  modified_base 12: mod_base = OTHER; note = 2'-fluoroguanosine
  modified_base 13: mod_base = gm
  modified_base 14: mod_base = OTHER; note = 2'-fluorouridine
  modified_base 15: mod_base = um
  modified_base 16: mod_base = OTHER; note = 2'-fluoroguanosine
  modified_base 17: mod_base = um
  modified_base 18: mod_base = gm
  modified_base 19: mod_base = OTHER; note = 2'-O-methyladenosine
  modified_base 20: mod_base = cm
  modified_base 20^21: mod_base = OTHER; note = phosphorothioate linkage
  modified_base 21: mod_base = um
  source 1..21: mol_type = other RNA
ngacatttattggttgtgact

SEQ ID NO: 663 - RNA, 21 nt, synthetic construct
  modified_base 1: mod_base = OTHER; note = 5'-cyclopropyl phosphonate-2'-O-methyladenosine
  modified_base 1^2: mod_base = OTHER; note = phosphorothioate linkage
  modified_base 2: mod_base = OTHER; note = 2'-fluoroguanosine
  modified_base 2^3: mod_base = OTHER; note = phosphorothioate linkage
  modified_base 3: mod_base = OTHER; note = 2'-O-methyladenosine
  modified_base 4: mod_base = cm
  modified_base 5: mod_base = gm
  modified_base 6: mod_base = um
  modified_base 7: mod_base = um
  modified_base 8: mod_base = um
  modified_base 9: mod_base = OTHER; note = 2'-O-methyladenosine
  modified_base 10: mod_base = OTHER; note = 2'-fluorouridine
  modified_base 11: mod_base = um
  modified_base 12: mod_base = OTHER; note = 2'-fluoroguanosine
  modified_base 13: mod_base = gm
  modified_base 14: mod_base = OTHER; note = 2'-fluorouridine
  modified_base 15: mod_base = um
  modified_base 16: mod_base = OTHER; note = 2'-fluoroguanosine
  modified_base 17: mod_base = um
  modified_base 18: mod_base = gm
  modified_base 19: mod_base = OTHER; note = 2'-O-methyladenosine
  modified_base 20: mod_base = cm
  modified_base 20^21: mod_base = OTHER; note = phosphorothioate linkage
  modified_base 21: mod_base = um
  source 1..21: mol_type = other RNA
agacgtttattggttgtgact

SEQ ID NO: 664 - RNA, 21 nt, synthetic construct
  modified_base 1: mod_base = OTHER; note = 5'-cyclopropyl phosphonate-2'-O-methyladenosine
  modified_base 1^2: mod_base = OTHER; note = phosphorothioate linkage
  modified_base 2: mod_base = OTHER; note = 2'-fluoroguanosine
  modified_base 2^3: mod_base = OTHER; note = phosphorothioate linkage
  modified_base 3: mod_base = OTHER; note = 2'-O-methyladenosine
  modified_base 4: mod_base = cm
  modified_base 5: mod_base = OTHER; note = 2'-O-methyladenosine
  modified_base 6: mod_base = um
  modified_base 7: mod_base = um
  modified_base 8: mod_base = um
  modified_base 9: mod_base = OTHER; note = 2'-O-methyladenosine
  modified_base 10: mod_base = OTHER; note = 2'-fluorouridine
  modified_base 11: mod_base = um
  modified_base 12: mod_base = OTHER; note = 2'-fluoroguanosine
  modified_base 13: mod_base = gm
  modified_base 14: mod_base = OTHER; note = 2'-fluorouridine
  modified_base 15: mod_base = um
  modified_base 16: mod_base = OTHER; note = 2'-fluoroguanosine
  modified_base 17: mod_base = um
  modified_base 18: mod_base = gm
  modified_base 19: mod_base = OTHER; note = 2'-O-methyladenosine
  modified_base 20: mod_base = cm
  modified_base 20^21: mod_base = OTHER; note = phosphorothioate linkage
  modified_base 20^21: mod_base = OTHER; note = phosphorothioate linkage
  modified_base 21: mod_base = um
  source 1..21: mol_type = other RNA
agacatttattggttgtgact

SEQ ID NO: 665 - RNA, 21 nt, synthetic construct
  modified_base 1: mod_base = OTHER; note = 5'-cyclopropyl phosphonate-2'-O-methyladenosine
  modified_base 2: mod_base = OTHER; note = 2'-fluoroguanosine
  modified_base 3: mod_base = OTHER; note = 2'-O-methyladenosine
  modified_base 4: mod_base = cm
  modified_base 5: mod_base = OTHER; note = 2'-O-methyladenosine
  modified_base 6: mod_base = um
  modified_base 7: mod_base = um
  modified_base 8: mod_base = um
  modified_base 9: mod_base = OTHER; note = 2'-O-methyladenosine
  modified_base 10: mod_base = OTHER; note = 2'-fluorouridine
  modified_base 11: mod_base = um
  modified_base 12: mod_base = OTHER; note = 2'-fluoroguanosine
  modified_base 13: mod_base = gm
  modified_base 14: mod_base = OTHER; note = 2'-fluorouridine
  modified_base 15: mod_base = um
  modified_base 16: mod_base = OTHER; note = 2'-fluoroguanosine
  modified_base 17: mod_base = um
  modified_base 18: mod_base = gm
  modified_base 19: mod_base = OTHER; note = 2'-O-methyladenosine
  modified_base 19^20: mod_base = OTHER; note = phosphorothioate linkage
  modified_base 20: mod_base = cm
  modified_base 20^21: mod_base = OTHER; note = phosphorothioate linkage
  modified_base 21: mod_base = um
  source 1..21: mol_type = other RNA
agacatttattggttgtgact

SEQ ID NO: 666 - RNA, 21 nt, synthetic construct
  modified_base 1: mod_base = OTHER; note = 5'-cyclopropyl phosphonate-2'-O-methyladenosine
  modified_base 2: mod_base = OTHER; note = 2'-fluoroguanosine
  modified_base 3: mod_base = OTHER; note = 2'-O-methyladenosine
  modified_base 4: mod_base = cm
  modified_base 5: mod_base = OTHER; note = 2'-O-methyladenosine
  modified_base 6: mod_base = um
  modified_base 7: mod_base = um
  modified_base 8: mod_base = um
  modified_base 9: mod_base = OTHER; note = 2'-O-methyladenosine
  modified_base 10: mod_base = OTHER; note = 2'-fluorouridine
  modified_base 11: mod_base = um
  modified_base 12: mod_base = OTHER; note = 2'-fluoroguanosine
  modified_base 13: mod_base = gm
  modified_base 14: mod_base = OTHER; note = 2'-fluorouridine
  modified_base 15: mod_base = um
  modified_base 16: mod_base = OTHER; note = 2'-fluoroguanosine
  modified_base 17: mod_base = um
  modified_base 18: mod_base = gm
  modified_base 19: mod_base = OTHER; note = 2'-O-methyladenosine
  modified_base 20: mod_base = cm
  modified_base 20^21: mod_base = OTHER; note = phosphorothioate linkage
  modified_base 20^21: mod_base = OTHER; note = phosphorothioate linkage
  modified_base 21: mod_base = um
  source 1..21: mol_type = other RNA
agacatttattggttgtgact

SEQ ID NO: 667 - RNA, 21 nt, synthetic construct
  modified_base 1: mod_base = OTHER; note = 5'-cyclopropyl phosphonate-2'-O-methyladenosine
  modified_base 1^2: mod_base = OTHER; note = phosphorothioate linkage
  modified_base 2: mod_base = OTHER; note = 2'-fluoroguanosine
  modified_base 2^3: mod_base = OTHER; note = phosphorothioate linkage
  modified_base 3: mod_base = OTHER; note = 2'-O-methyladenosine
  modified_base 4: mod_base = cm
  modified_base 5: mod_base = OTHER; note = 2'-O-methyladenosine
  modified_base 6: mod_base = OTHER; note = thymine glycol nucleic acid
  modified_base 7: mod_base = um
  modified_base 8: mod_base = um
  modified_base 9: mod_base = OTHER; note = 2'-O-methyladenosine
  modified_base 10: mod_base = OTHER; note = 2'-fluorouridine
  modified_base 11: mod_base = um
  modified_base 12: mod_base = OTHER; note = 2'-fluoroguanosine
  modified_base 13: mod_base = gm
  modified_base 14: mod_base = OTHER; note = 2'-fluorouridine
  modified_base 15: mod_base = um
  modified_base 16: mod_base = OTHER; note = 2'-fluoroguanosine
  modified_base 17: mod_base = um
  modified_base 18: mod_base = gm
  modified_base 19: mod_base = OTHER; note = 2'-O-methyladenosine
  modified_base 20: mod_base = cm
  modified_base 20^21: mod_base = OTHER; note = phosphorothioate linkage
  modified_base 21: mod_base = um
  source 1..21: mol_type = other RNA
agacatttattggttgtgact

SEQ ID NO: 668 - RNA, 21 nt, synthetic construct
  modified_base 1: mod_base = OTHER; note = 5'-cyclopropyl phosphonate-2'-O-methyladenosine
  modified_base 1^2: mod_base = OTHER; note = phosphorothioate linkage
  modified_base 2: mod_base = OTHER; note = 2'-fluoroguanosine
  modified_base 2^3: mod_base = OTHER; note = phosphorothioate linkage
  modified_base 3: mod_base = OTHER; note = 2'-O-methyladenosine
  modified_base 4: mod_base = cm
  modified_base 5: mod_base = OTHER; note = 2'-O-methyladenosine
  modified_base 6: mod_base = um
  modified_base 7: mod_base = um
  modified_base 8: mod_base = OTHER; note = thymine glycol nucleic acid
  modified_base 9: mod_base = OTHER; note = 2'-O-methyladenosine
  modified_base 10: mod_base = OTHER; note = 2'-fluorouridine
  modified_base 11: mod_base = um
  modified_base 12: mod_base = OTHER; note = 2'-fluoroguanosine
  modified_base 13: mod_base = gm
  modified_base 14: mod_base = OTHER; note = 2'-fluorouridine
  modified_base 15: mod_base = um
  modified_base 16: mod_base = OTHER; note = 2'-fluoroguanosine
  modified_base 17: mod_base = um
  modified_base 18: mod_base = gm
  modified_base 19: mod_base = OTHER; note = 2'-O-methyladenosine
  modified_base 20: mod_base = cm
  modified_base 20^21: mod_base = OTHER; note = phosphorothioate linkage
  modified_base 21: mod_base = um
  source 1..21: mol_type = other RNA
agacatttattggttgtgact

SEQ ID NO: 669 - RNA, 21 nt, synthetic construct
  modified_base 1: mod_base = OTHER; note = 5'-cyclopropyl phosphonate-2'-O-methyladenosine
  modified_base 1^2: mod_base = OTHER; note = phosphorothioate linkage
  modified_base 2: mod_base = OTHER; note = 2'-fluoroguanosine
  modified_base 2^3: mod_base = OTHER; note = phosphorothioate linkage
  modified_base 3: mod_base = OTHER; note = 2'-O-methyladenosine
  modified_base 4: mod_base = cm
  modified_base 5: mod_base = OTHER; note = 2'-O-methyladenosine
  modified_base 6: mod_base = um
  modified_base 7: mod_base = um
  modified_base 8: mod_base = OTHER; note = 2 ,3 -seco-uridine
  modified_base 9: mod_base = OTHER; note = 2'-O-methyladenosine
  modified_base 10: mod_base = OTHER; note = 2'-fluorouridine
  modified_base 11: mod_base = um
  modified_base 12: mod_base = OTHER; note = 2'-fluoroguanosine
  modified_base 13: mod_base = gm
  modified_base 14: mod_base = OTHER; note = 2'-fluorouridine
  modified_base 15: mod_base = um
  modified_base 16: mod_base = OTHER; note = 2'-fluoroguanosine
  modified_base 17: mod_base = um
  modified_base 18: mod_base = gm
  modified_base 19: mod_base = OTHER; note = 2'-O-methyladenosine
  modified_base 20: mod_base = cm
  modified_base 20^21: mod_base = OTHER; note = phosphorothioate linkage
  modified_base 21: mod_base = um
  source 1..21: mol_type = other RNA
agacatttattggttgtgact

SEQ ID NO: 670 - RNA, 21 nt, synthetic construct
  modified_base 1: mod_base = OTHER; note = 5'-cyclopropyl phosphonate-2'-O-methyluridine
  modified_base 1^2: mod_base = OTHER; note = phosphorothioate linkage
  modified_base 2: mod_base = OTHER; note = 2'-fluorocytidine
  modified_base 2^3: mod_base = OTHER; note = phosphorothioate linkage
  modified_base 3: mod_base = OTHER; note = 2'-O-methyladenosine
  modified_base 4: mod_base = OTHER; note = 2'-fluoroguanosine
  modified_base 5: mod_base = OTHER; note = 2'-O-methyladenosine
  modified_base 6: mod_base = OTHER; note = 2'-fluorouridine
  modified_base 7: mod_base = OTHER; note = 2'-O-methyladenosine
  modified_base 8: mod_base = gm
  modified_base 9: mod_base = cm
  modified_base 10: mod_base = um
  modified_base 11: mod_base = OTHER; note = 2'-O-methyladenosine
  modified_base 12: mod_base = OTHER; note = 2'-fluoroadenosine
  modified_base 13: mod_base = gm
  modified_base 14: mod_base = OTHER; note = 2'-fluoroguanosine
  modified_base 15: mod_base = cm
  modified_base 16: mod_base = OTHER; note = 2'-fluoroadenosine
  modified_base 17: mod_base = gm
  modified_base 18: mod_base = OTHER; note = 2'-fluorocytidine
  modified_base 19: mod_base = cm
  modified_base 20: mod_base = um
  modified_base 20^21: mod_base = OTHER; note = phosphorothioate linkage
  modified_base 21: mod_base = um
  source 1..21: mol_type = other RNA
tcagatagctaaggcagcctt

SEQ ID NO: 671 - RNA, 21 nt, synthetic construct
  modified_base 1: mod_base = OTHER; note = 5'-cyclopropyl phosphonate-2'-O-methyluridine
  modified_base 1^2: mod_base = OTHER; note = phosphorothioate linkage
  modified_base 2: mod_base = OTHER; note = 2'-fluoroadenosine
  modified_base 2^3: mod_base = OTHER; note = phosphorothioate linkage
  modified_base 3: mod_base = gm
  modified_base 4: mod_base = OTHER; note = 2'-fluorouridine
  modified_base 5: mod_base = OTHER; note = 2'-O-methyladenosine
  modified_base 6: mod_base = OTHER; note = 2'-fluoroadenosine
  modified_base 7: mod_base = OTHER; note = 2'-O-methyladenosine
  modified_base 8: mod_base = gm
  modified_base 9: mod_base = gm
  modified_base 10: mod_base = um
  modified_base 11: mod_base = cm
  modified_base 12: mod_base = OTHER; note = 2'-fluoroguanosine
  modified_base 13: mod_base = OTHER; note = 2'-O-methyladenosine
  modified_base 14: mod_base = OTHER; note = 2'-fluorouridine
  modified_base 15: mod_base = um
  modified_base 16: mod_base = OTHER; note = 2'-fluoroguanosine
  modified_base 17: mod_base = OTHER; note = 2'-O-methyladenosine
  modified_base 18: mod_base = OTHER; note = 2'-fluoroadenosine
  modified_base 19: mod_base = gm
  modified_base 20: mod_base = cm
  modified_base 20^21: mod_base = OTHER; note = phosphorothioate linkage
  modified_base 21: mod_base = gm
  source 1..21: mol_type = other RNA
tagtaaaggtcgattgaagcg

SEQ ID NO: 672 - RNA, 21 nt, synthetic construct
  modified_base 1: mod_base = OTHER; note = 5'-cyclopropyl phosphonate-2'-O-methyluridine
  modified_base 1^2: mod_base = OTHER; note = phosphorothioate linkage
  modified_base 2: mod_base = OTHER; note = 2'-fluoroadenosine
  modified_base 2^3: mod_base = OTHER; note = phosphorothioate linkage
  modified_base 3: mod_base = cm
  modified_base 4: mod_base = OTHER; note = 2'-fluoroadenosine
  modified_base 5: mod_base = gm
  modified_base 6: mod_base = OTHER; note = 2'-fluorouridine
  modified_base 7: mod_base = um
  modified_base 8: mod_base = OTHER; note = 2'-O-methyladenosine
  modified_base 9: mod_base = gm
  modified_base 10: mod_base = OTHER; note = 2'-O-methyladenosine
  modified_base 11: mod_base = gm
  modified_base 12: mod_base = OTHER; note = 2'-fluorouridine
  modified_base 13: mod_base = um
  modified_base 14: mod_base = OTHER; note = 2'-fluoroadenosine
  modified_base 15: mod_base = OTHER; note = 2'-O-methyladenosine
  modified_base 16: mod_base = OTHER; note = 2'-fluorouridine
  modified_base 17: mod_base = gm
  modified_base 18: mod_base = OTHER; note = 2'-fluorouridine
  modified_base 19: mod_base = um
  modified_base 20: mod_base = um
  modified_base 20^21: mod_base = OTHER; note = phosphorothioate linkage
  modified_base 21: mod_base = cm
  source 1..21: mol_type = other RNA
tacagttagagttaatgtttc

SEQ ID NO: 673 - RNA, 21 nt, synthetic construct
  modified_base 1: mod_base = OTHER; note = 5'-cyclopropyl phosphonate-2'-O-methyluridine
  modified_base 1^2: mod_base = OTHER; note = phosphorothioate linkage
  modified_base 2: mod_base = OTHER; note = 2'-fluoroadenosine
  modified_base 2^3: mod_base = OTHER; note = phosphorothioate linkage
  modified_base 3: mod_base = OTHER; note = 2'-O-methyladenosine
  modified_base 4: mod_base = OTHER; note = 2'-fluoroguanosine
  modified_base 5: mod_base = um
  modified_base 6: mod_base = OTHER; note = 2'-fluorouridine
  modified_base 7: mod_base = OTHER; note = 2'-O-methyladenosine
  modified_base 8: mod_base = OTHER; note = 2'-O-methyladenosine
  modified_base 9: mod_base = gm
  modified_base 10: mod_base = OTHER; note = 2'-O-methyladenosine
  modified_base 11: mod_base = OTHER; note = 2'-O-methyladenosine
  modified_base 12: mod_base = OTHER; note = 2'-fluoroadenosine
  modified_base 13: mod_base = cm
  modified_base 14: mod_base = OTHER; note = 2'-fluorouridine
  modified_base 15: mod_base = cm
  modified_base 16: mod_base = OTHER; note = 2'-fluorouridine
  modified_base 17: mod_base = um
  modified_base 18: mod_base = OTHER; note = 2'-fluorocytidine
  modified_base 19: mod_base = um
  modified_base 20: mod_base = gm
  modified_base 20^21: mod_base = OTHER; note = phosphorothioate linkage
  modified_base 21: mod_base = um
  source 1..21: mol_type = other RNA
taagttaagaaactcttctgt

SEQ ID NO: 674 - RNA, 21 nt, synthetic construct
  modified_base 1: mod_base = OTHER; note = 5'-cyclopropyl phosphonate-2'-O-methyluridine
  modified_base 1^2: mod_base = OTHER; note = phosphorothioate linkage
  modified_base 2: mod_base = OTHER; note = 2'-fluorocytidine
  modified_base 2^3: mod_base = OTHER; note = phosphorothioate linkage
  modified_base 3: mod_base = OTHER; note = 2'-O-methyladenosine
  modified_base 4: mod_base = OTHER; note = 2'-fluoroadenosine
  modified_base 5: mod_base = cm
  modified_base 6: mod_base = OTHER; note = 2'-fluoroadenosine
  modified_base 7: mod_base = um
  modified_base 8: mod_base = um
  modified_base 9: mod_base = um
  modified_base 10: mod_base = gm
  modified_base 11: mod_base = OTHER; note = 2'-O-methyladenosine
  modified_base 12: mod_base = OTHER; note = 2'-fluoroguanosine
  modified_base 13: mod_base = gm
  modified_base 14: mod_base = OTHER; note = 2'-fluoroadenosine
  modified_base 15: mod_base = gm
  modified_base 16: mod_base = OTHER; note = 2'-fluorouridine
  modified_base 17: mod_base = OTHER; note = 2'-O-methyladenosine
  modified_base 18: mod_base = OTHER; note = 2'-fluoroguanosine
  modified_base 19: mod_base = um
  modified_base 20: mod_base = OTHER; note = 2'-O-methyladenosine
  modified_base 20^21: mod_base = OTHER; note = phosphorothioate linkage
  modified_base 21: mod_base = cm
  source 1..21: mol_type = other RNA
tcaacatttgaggagtagtac

SEQ ID NO: 675 - RNA, 21 nt, synthetic construct
  modified_base 1: mod_base = OTHER; note = 5'-cyclopropyl phosphonate-2'-O-methyluridine
  modified_base 1^2: mod_base = OTHER; note = phosphorothioate linkage
  modified_base 2: mod_base = OTHER; note = 2'-fluoroadenosine
  modified_base 2^3: mod_base = OTHER; note = phosphorothioate linkage
  modified_base 3: mod_base = gm
  modified_base 4: mod_base = OTHER; note = 2'-fluorouridine
  modified_base 5: mod_base = cm
  modified_base 6: mod_base = OTHER; note = 2'-fluoroadenosine
  modified_base 7: mod_base = um
  modified_base 8: mod_base = cm
  modified_base 9: mod_base = OTHER; note = 2'-O-methyladenosine
  modified_base 10: mod_base = OTHER; note = 2'-O-methyladenosine
  modified_base 11: mod_base = um
  modified_base 12: mod_base = OTHER; note = 2'-fluoroguanosine
  modified_base 13: mod_base = um
  modified_base 14: mod_base = OTHER; note = 2'-fluorouridine
  modified_base 15: mod_base = OTHER; note = 2'-O-methyladenosine
  modified_base 16: mod_base = OTHER; note = 2'-fluorouridine
  modified_base 17: mod_base = gm
  modified_base 18: mod_base = OTHER; note = 2'-fluoroguanosine
  modified_base 19: mod_base = OTHER; note = 2'-O-methyladenosine
  modified_base 20: mod_base = OTHER; note = 2'-O-methyladenosine
  modified_base 20^21: mod_base = OTHER; note = phosphorothioate linkage
  modified_base 21: mod_base = gm
  source 1..21: mol_type = other RNA
tagtcatcaatgttatggaag

SEQ ID NO: 676 - RNA, 21 nt, synthetic construct
  modified_base 1: mod_base = OTHER; note = 5'-cyclopropyl phosphonate-2'-O-methyladenosine
  modified_base 1^2: mod_base = OTHER; note = phosphorothioate linkage
  modified_base 2: mod_base = OTHER; note = 2'-fluoroadenosine
  modified_base 2^3: mod_base = OTHER; note = phosphorothioate linkage
  modified_base 3: mod_base = gm
  modified_base 4: mod_base = OTHER; note = 2'-fluorouridine
  modified_base 5: mod_base = um
  modified_base 6: mod_base = OTHER; note = 2'-fluorouridine
  modified_base 7: mod_base = OTHER; note = 2'-O-methyladenosine
  modified_base 8: mod_base = gm
  modified_base 9: mod_base = gm
  modified_base 10: mod_base = um
  modified_base 11: mod_base = gm
  modified_base 12: mod_base = OTHER; note = 2'-fluorocytidine
  modified_base 13: mod_base = um
  modified_base 14: mod_base = OTHER; note = 2'-fluoroadenosine
  modified_base 15: mod_base = um
  modified_base 16: mod_base = OTHER; note = 2'-fluorocytidine
  modified_base 17: mod_base = OTHER; note = 2'-O-methyladenosine
  modified_base 18: mod_base = OTHER; note = 2'-fluorouridine
  modified_base 19: mod_base = um
  modified_base 20: mod_base = gm
  modified_base 20^21: mod_base = OTHER; note = phosphorothioate linkage
  modified_base 21: mod_base = cm
  source 1..21: mol_type = other RNA
aagtttaggtgctatcattgc

SEQ ID NO: 677 - RNA, 21 nt, synthetic construct
  modified_base 1: mod_base = OTHER; note = 5'-cyclopropyl phosphonate-2'-O-methyluridine
  modified_base 1^2: mod_base = OTHER; note = phosphorothioate linkage
  modified_base 2: mod_base = OTHER; note = 2'-fluoroguanosine
  modified_base 2^3: mod_base = OTHER; note = phosphorothioate linkage
  modified_base 3: mod_base = um
  modified_base 4: mod_base = OTHER; note = 2'-fluoroadenosine
  modified_base 5: mod_base = gm
  modified_base 6: mod_base = OTHER; note = 2'-fluoroadenosine
  modified_base 7: mod_base = OTHER; note = 2'-O-methyladenosine
  modified_base 8: mod_base = gm
  modified_base 9: mod_base = gm
  modified_base 10: mod_base = OTHER; note = 2'-O-methyladenosine
  modified_base 11: mod_base = OTHER; note = 2'-O-methyladenosine
  modified_base 12: mod_base = OTHER; note = 2'-fluorouridine
  modified_base 13: mod_base = gm
  modified_base 14: mod_base = OTHER; note = 2'-fluorouridine
  modified_base 15: mod_base = cm
  modified_base 16: mod_base = OTHER; note = 2'-fluorouridine
  modified_base 17: mod_base = gm
  modified_base 18: mod_base = OTHER; note = 2'-fluorouridine
  modified_base 19: mod_base = cm
  modified_base 20: mod_base = um
  modified_base 20^21: mod_base = OTHER; note = phosphorothioate linkage
  modified_base 21: mod_base = um
  source 1..21: mol_type = other RNA
tgtagaaggaatgtctgtctt

SEQ ID NO: 678 - RNA, 21 nt, synthetic construct
  modified_base 1: mod_base = OTHER; note = 5'-cyclopropyl phosphonate-2'-O-methyluridine
  modified_base 1^2: mod_base = OTHER; note = phosphorothioate linkage
  modified_base 2: mod_base = OTHER; note = 2'-fluoroadenosine
  modified_base 2^3: mod_base = OTHER; note = phosphorothioate linkage
  modified_base 3: mod_base = cm
  modified_base 4: mod_base = OTHER; note = 2'-fluoroadenosine
  modified_base 5: mod_base = OTHER; note = 2'-O-methyladenosine
  modified_base 6: mod_base = OTHER; note = 2'-fluoroguanosine
  modified_base 7: mod_base = OTHER; note = 2'-O-methyladenosine
  modified_base 8: mod_base = OTHER; note = 2'-O-methyladenosine
  modified_base 9: mod_base = gm
  modified_base 10: mod_base = um
  modified_base 11: mod_base = gm
  modified_base 12: mod_base = OTHER; note = 2'-fluorouridine
  modified_base 13: mod_base = cm
  modified_base 14: mod_base = OTHER; note = 2'-fluoroadenosine
  modified_base 15: mod_base = um
  modified_base 16: mod_base = OTHER; note = 2'-fluorouridine
  modified_base 17: mod_base = OTHER; note = 2'-O-methyladenosine
  modified_base 18: mod_base = OTHER; note = 2'-fluorocytidine
  modified_base 19: mod_base = OTHER; note = 2'-O-methyladenosine
  modified_base 20: mod_base = um
  modified_base 20^21: mod_base = OTHER; note = phosphorothioate linkage
  modified_base 21: mod_base = gm
  source 1..21: mol_type = other RNA
tacaagaagtgtcattacatg

SEQ ID NO: 679 - RNA, 21 nt, synthetic construct
  modified_base 1: mod_base = OTHER; note = 5'-cyclopropyl phosphonate-2'-O-methyluridine
  modified_base 1^2: mod_base = OTHER; note = phosphorothioate linkage
  modified_base 2: mod_base = OTHER; note = 2'-fluorouridine
  modified_base 2^3: mod_base = OTHER; note = phosphorothioate linkage
  modified_base 3: mod_base = um
  modified_base 4: mod_base = OTHER; note = 2'-fluorocytidine
  modified_base 5: mod_base = um
  modified_base 6: mod_base = OTHER; note = 2'-fluorocytidine
  modified_base 7: mod_base = OTHER; note = 2'-O-methyladenosine
  modified_base 8: mod_base = gm
  modified_base 9: mod_base = gm
  modified_base 10: mod_base = OTHER; note = 2'-O-methyladenosine
  modified_base 11: mod_base = um
  modified_base 12: mod_base = OTHER; note = 2'-fluorocytidine
  modified_base 13: mod_base = um
  modified_base 14: mod_base = OTHER; note = 2'-fluoroadenosine
  modified_base 15: mod_base = cm
  modified_base 16: mod_base = OTHER; note = 2'-fluorouridine
  modified_base 17: mod_base = um
  modified_base 18: mod_base = OTHER; note = 2'-fluoroguanosine
  modified_base 19: mod_base = um
  modified_base 20: mod_base = OTHER; note = 2'-O-methyladenosine
  modified_base 20^21: mod_base = OTHER; note = phosphorothioate linkage
  modified_base 21: mod_base = um
  source 1..21: mol_type = other RNA
tttctcaggatctacttgtat

SEQ ID NO: 680 - RNA, 21 nt, synthetic construct
  modified_base 1: mod_base = OTHER; note = 5'-cyclopropyl phosphonate-2'-O-methyladenosine
  modified_base 1^2: mod_base = OTHER; note = phosphorothioate linkage
  modified_base 2: mod_base = OTHER; note = 2'-fluoroguanosine
  modified_base 2^3: mod_base = OTHER; note = phosphorothioate linkage
  modified_base 3: mod_base = OTHER; note = 2'-O-methyladenosine
  modified_base 4: mod_base = cm
  modified_base 5: mod_base = OTHER; note = 2'-O-methyladenosine
  modified_base 6: mod_base = um
  modified_base 7: mod_base = um
  modified_base 8: mod_base = um
  modified_base 9: mod_base = gm
  modified_base 10: mod_base = OTHER; note = 2'-fluorouridine
  modified_base 11: mod_base = um
  modified_base 12: mod_base = OTHER; note = 2'-fluoroguanosine
  modified_base 13: mod_base = gm
  modified_base 14: mod_base = OTHER; note = 2'-fluorouridine
  modified_base 15: mod_base = um
  modified_base 16: mod_base = OTHER; note = 2'-fluoroguanosine
  modified_base 17: mod_base = um
  modified_base 18: mod_base = gm
  modified_base 19: mod_base = OTHER; note = 2'-O-methyladenosine
  modified_base 20: mod_base = cm
  modified_base 20^21: mod_base = OTHER; note = phosphorothioate linkage
  modified_base 21: mod_base = cm
  source 1..21: mol_type = other RNA
agacatttgttggttgtgacc

SEQ ID NO: 681 - RNA, 21 nt, synthetic construct
  modified_base 1: mod_base = OTHER; note = 5'-cyclopropyl phosphonate-2'-O-methyladenosine
  modified_base 1^2: mod_base = OTHER; note = phosphorothioate linkage
  modified_base 2: mod_base = OTHER; note = 2'-fluoroguanosine
  modified_base 2^3: mod_base = OTHER; note = phosphorothioate linkage
  modified_base 3: mod_base = OTHER; note = 2'-O-methyladenosine
  modified_base 4: mod_base = cm
  modified_base 5: mod_base = gm
  modified_base 6: mod_base = um
  modified_base 7: mod_base = um
  modified_base 8: mod_base = um
  modified_base 9: mod_base = OTHER; note = 2'-O-methyladenosine
  modified_base 10: mod_base = OTHER; note = 2'-fluorouridine
  modified_base 11: mod_base = um
  modified_base 12: mod_base = OTHER; note = 2'-fluoroguanosine
  modified_base 13: mod_base = gm
  modified_base 14: mod_base = OTHER; note = 2'-fluorouridine
  modified_base 15: mod_base = um
  modified_base 16: mod_base = OTHER; note = 2'-fluoroguanosine
  modified_base 17: mod_base = um
  modified_base 18: mod_base = gm
  modified_base 19: mod_base = OTHER; note = 2'-O-methyladenosine
  modified_base 20: mod_base = cm
  modified_base 20^21: mod_base = OTHER; note = phosphorothioate linkage
  modified_base 21: mod_base = cm
  source 1..21: mol_type = other RNA
agacgtttattggttgtgacc

SEQ ID NO: 682 - RNA, 21 nt, synthetic construct
  modified_base 1: mod_base = OTHER; note = 5'-cyclopropyl phosphonate-2'-O-methyladenosine
  modified_base 1^2: mod_base = OTHER; note = phosphorothioate linkage
  modified_base 2: mod_base = OTHER; note = 2'-fluoroguanosine
  modified_base 2^3: mod_base = OTHER; note = phosphorothioate linkage
  modified_base 3: mod_base = OTHER; note = 2'-O-methyladenosine
  modified_base 4: mod_base = cm
  modified_base 5: mod_base = gm
  modified_base 6: mod_base = um
  modified_base 7: mod_base = um
  modified_base 8: mod_base = um
  modified_base 9: mod_base = OTHER; note = 2'-O-methyladenosine
  modified_base 10: mod_base = OTHER; note = 2'-fluorouridine
  modified_base 11: mod_base = OTHER; note = 2'-deoxythymidine
  modified_base 12: mod_base = OTHER; note = 2'-fluoroguanosine
  modified_base 13: mod_base = gm
  modified_base 14: mod_base = OTHER; note = 2'-fluorouridine
  modified_base 15: mod_base = um
  modified_base 16: mod_base = OTHER; note = 2'-fluoroguanosine
  modified_base 17: mod_base = um
  modified_base 18: mod_base = gm
  modified_base 19: mod_base = OTHER; note = 2'-O-methyladenosine
  modified_base 20: mod_base = cm
  modified_base 20^21: mod_base = OTHER; note = phosphorothioate linkage
  modified_base 21: mod_base = cm
  source 1..21: mol_type = other RNA
agacgtttattggttgtgacc

SEQ ID NO: 683 - RNA, 21 nt, synthetic construct
  modified_base 1: mod_base = OTHER; note = 5'-cyclopropyl phosphonate-2'-O-methyladenosine
  modified_base 1^2: mod_base = OTHER; note = phosphorothioate linkage
  modified_base 2: mod_base = OTHER; note = 2'-fluoroguanosine
  modified_base 2^3: mod_base = OTHER; note = phosphorothioate linkage
  modified_base 3: mod_base = OTHER; note = 2'-O-methyladenosine
  modified_base 4: mod_base = cm
  modified_base 5: mod_base = OTHER; note = 2'-O-methyladenosine
  modified_base 6: mod_base = um
  modified_base 7: mod_base = um
  modified_base 8: mod_base = um
  modified_base 9: mod_base = OTHER; note = 2'-O-methyladenosine
  modified_base 10: mod_base = OTHER; note = 2'-fluorouridine
  modified_base 11: mod_base = OTHER; note = 2'-deoxythymidine
  modified_base 12: mod_base = OTHER; note = 2'-fluoroguanosine
  modified_base 13: mod_base = gm
  modified_base 14: mod_base = OTHER; note = 2'-fluorouridine
  modified_base 15: mod_base = um
  modified_base 16: mod_base = OTHER; note = 2'-fluoroguanosine
  modified_base 17: mod_base = um
  modified_base 18: mod_base = gm
  modified_base 19: mod_base = OTHER; note = 2'-O-methyladenosine
  modified_base 20: mod_base = cm
  modified_base 20^21: mod_base = OTHER; note = phosphorothioate linkage
  modified_base 21: mod_base = cm
  source 1..21: mol_type = other RNA
agacatttattggttgtgacc

SEQ ID NO: 684 - RNA, 21 nt, synthetic construct
  modified_base 1: mod_base = OTHER; note = 5'-cyclopropyl phosphonate-2'-O-methyladenosine
  modified_base 1^2: mod_base = OTHER; note = phosphorothioate linkage
  modified_base 2: mod_base = OTHER; note = 2'-fluoroguanosine
  modified_base 2^3: mod_base = OTHER; note = phosphorothioate linkage
  modified_base 3: mod_base = OTHER; note = 2'-O-methyladenosine
  modified_base 4: mod_base = cm
  modified_base 5: mod_base = OTHER; note = 2'-O-methyladenosine
  modified_base 6: mod_base = um
  modified_base 7: mod_base = um
  modified_base 8: mod_base = um
  modified_base 9: mod_base = OTHER; note = 2'-O-methyladenosine
  modified_base 10: mod_base = OTHER; note = 2'-deoxythymidine
  modified_base 11: mod_base = um
  modified_base 12: mod_base = OTHER; note = 2'-fluoroguanosine
  modified_base 13: mod_base = gm
  modified_base 14: mod_base = OTHER; note = 2'-fluorouridine
  modified_base 15: mod_base = um
  modified_base 16: mod_base = OTHER; note = 2'-fluoroguanosine
  modified_base 17: mod_base = um
  modified_base 18: mod_base = gm
  modified_base 19: mod_base = OTHER; note = 2'-O-methyladenosine
  modified_base 20: mod_base = cm
  modified_base 20^21: mod_base = OTHER; note = phosphorothioate linkage
  modified_base 21: mod_base = cm
  source 1..21: mol_type = other RNA
agacatttattggttgtgacc

SEQ ID NO: 685 - RNA, 21 nt, synthetic construct
  modified_base 1: mod_base = OTHER; note = 5'-cyclopropyl phosphonate-2'-O-methylinosine
  modified_base 1^2: mod_base = OTHER; note = phosphorothioate linkage
  modified_base 2: mod_base = OTHER; note = 2'-fluoroguanosine
  modified_base 2^3: mod_base = OTHER; note = phosphorothioate linkage
  modified_base 3: mod_base = OTHER; note = 2'-O-methyladenosine
  modified_base 4: mod_base = cm
  modified_base 5: mod_base = gm
  modified_base 6: mod_base = um
  modified_base 7: mod_base = um
  modified_base 8: mod_base = um
  modified_base 9: mod_base = OTHER; note = 2'-O-methyladenosine
  modified_base 10: mod_base = OTHER; note = 2'-fluorouridine
  modified_base 11: mod_base = um
  modified_base 12: mod_base = OTHER; note = 2'-fluoroguanosine
  modified_base 13: mod_base = gm
  modified_base 14: mod_base = OTHER; note = 2'-fluorouridine
  modified_base 15: mod_base = um
  modified_base 16: mod_base = OTHER; note = 2'-fluoroguanosine
  modified_base 17: mod_base = um
  modified_base 18: mod_base = gm
  modified_base 19: mod_base = OTHER; note = 2'-O-methyladenosine
  modified_base 20: mod_base = cm
  modified_base 20^21: mod_base = OTHER; note = phosphorothioate linkage
  modified_base 21: mod_base = cm
  source 1..21: mol_type = other RNA
ngacgtttattggttgtgacc

SEQ ID NO: 686 - RNA, 21 nt, synthetic construct
  modified_base 1: mod_base = OTHER; note = 5'-cyclopropyl phosphonate-2'-O-methylinosine
  modified_base 1^2: mod_base = OTHER; note = phosphorothioate linkage
  modified_base 2: mod_base = OTHER; note = 2'-fluoroguanosine
  modified_base 2^3: mod_base = OTHER; note = phosphorothioate linkage
  modified_base 3: mod_base = OTHER; note = 2'-O-methyladenosine
  modified_base 4: mod_base = cm
  modified_base 5: mod_base = OTHER; note = 2'-O-methyladenosine
  modified_base 6: mod_base = um
  modified_base 7: mod_base = um
  modified_base 8: mod_base = um
  modified_base 9: mod_base = OTHER; note = 2'-O-methyladenosine
  modified_base 10: mod_base = OTHER; note = 2'-fluorouridine
  modified_base 11: mod_base = um
  modified_base 12: mod_base = OTHER; note = 2'-fluoroguanosine
  modified_base 13: mod_base = gm
  modified_base 14: mod_base = OTHER; note = 2'-fluorouridine
  modified_base 15: mod_base = um
  modified_base 16: mod_base = OTHER; note = 2'-fluoroguanosine
  modified_base 17: mod_base = um
  modified_base 18: mod_base = gm
  modified_base 19: mod_base = OTHER; note = 2'-O-methyladenosine
  modified_base 20: mod_base = cm
  modified_base 20^21: mod_base = OTHER; note = phosphorothioate linkage
  modified_base 21: mod_base = cm
  source 1..21: mol_type = other RNA
ngacatttattggttgtgacc

SEQ ID NO: 687 - RNA, 21 nt, synthetic construct
  modified_base 1: mod_base = OTHER; note = 5'-cyclopropyl phosphonate-2'-O-methylinosine
  modified_base 1^2: mod_base = OTHER; note = phosphorothioate linkage
  modified_base 2: mod_base = OTHER; note = 2'-fluoroguanosine
  modified_base 2^3: mod_base = OTHER; note = phosphorothioate linkage
  modified_base 3: mod_base = OTHER; note = 2'-O-methyladenosine
  modified_base 4: mod_base = cm
  modified_base 5: mod_base = OTHER; note = 2'-O-methyladenosine
  modified_base 6: mod_base = um
  modified_base 7: mod_base = um
  modified_base 8: mod_base = um
  modified_base 9: mod_base = OTHER; note = 2'-O-methyladenosine
  modified_base 10: mod_base = OTHER; note = 2'-fluorouridine
  modified_base 11: mod_base = um
  modified_base 12: mod_base = OTHER; note = 2'-fluoroguanosine
  modified_base 13: mod_base = gm
  modified_base 14: mod_base = OTHER; note = 2'-fluorouridine
  modified_base 15: mod_base = um
  modified_base 16: mod_base = OTHER; note = 2'-fluoroguanosine
  modified_base 17: mod_base = um
  modified_base 18: mod_base = gm
  modified_base 19: mod_base = OTHER; note = 2'-O-methyladenosine
  modified_base 20: mod_base = cm
  modified_base 20^21: mod_base = OTHER; note = phosphorothioate linkage
  modified_base 20^21: mod_base = OTHER; note = phosphorothioate linkage
  modified_base 21: mod_base = cm
  source 1..21: mol_type = other RNA
ngacatttattggttgtgacc

SEQ ID NO: 688 - RNA, 21 nt, synthetic construct
  modified_base 1: mod_base = OTHER; note = 5'-cyclopropyl phosphonate-2'-O-methyladenosine
  modified_base 1^2: mod_base = OTHER; note = phosphorothioate linkage
  modified_base 2: mod_base = OTHER; note = 2'-fluoroguanosine
  modified_base 2^3: mod_base = OTHER; note = phosphorothioate linkage
  modified_base 3: mod_base = OTHER; note = 2'-O-methyladenosine
  modified_base 4: mod_base = cm
  modified_base 5: mod_base = OTHER; note = 2'-O-methyladenosine
  modified_base 6: mod_base = um
  modified_base 7: mod_base = um
  modified_base 8: mod_base = um
  modified_base 9: mod_base = OTHER; note = 2'-O-methyladenosine
  modified_base 10: mod_base = OTHER; note = 2'-fluorouridine
  modified_base 11: mod_base = um
  modified_base 12: mod_base = OTHER; note = 2'-fluoroguanosine
  modified_base 13: mod_base = gm
  modified_base 14: mod_base = OTHER; note = 2'-fluorouridine
  modified_base 15: mod_base = um
  modified_base 16: mod_base = OTHER; note = 2'-fluoroguanosine
  modified_base 17: mod_base = um
  modified_base 18: mod_base = gm
  modified_base 19: mod_base = OTHER; note = 2'-O-methyladenosine
  modified_base 20: mod_base = cm
  modified_base 20^21: mod_base = OTHER; note = phosphorothioate linkage
  modified_base 20^21: mod_base = OTHER; note = phosphorothioate linkage
  modified_base 21: mod_base = cm
  source 1..21: mol_type = other RNA
agacatttattggttgtgacc

SEQ ID NO: 689 - RNA, 21 nt, synthetic construct
  modified_base 1: mod_base = OTHER; note = 5'-cyclopropyl phosphonate-2'-O-methyladenosine
  modified_base 1^2: mod_base = OTHER; note = phosphorothioate linkage
  modified_base 2: mod_base = OTHER; note = 2'-fluoroguanosine
  modified_base 2^3: mod_base = OTHER; note = phosphorothioate linkage
  modified_base 3: mod_base = OTHER; note = 2'-O-methyladenosine
  modified_base 4: mod_base = cm
  modified_base 5: mod_base = gm
  modified_base 6: mod_base = um
  modified_base 7: mod_base = um
  modified_base 8: mod_base = um
  modified_base 9: mod_base = OTHER; note = 2'-O-methyladenosine
  modified_base 10: mod_base = OTHER; note = 2'-fluorouridine
  modified_base 11: mod_base = um
  modified_base 12: mod_base = OTHER; note = 2'-fluoroguanosine
  modified_base 13: mod_base = gm
  modified_base 14: mod_base = OTHER; note = 2'-fluorouridine
  modified_base 15: mod_base = um
  modified_base 16: mod_base = OTHER; note = 2'-fluoroguanosine
  modified_base 17: mod_base = um
  modified_base 18: mod_base = gm
  modified_base 19: mod_base = OTHER; note = 2'-O-methyladenosine
  modified_base 20: mod_base = cm
  modified_base 20^21: mod_base = OTHER; note = phosphorothioate linkage
  modified_base 20^21: mod_base = OTHER; note = phosphorothioate linkage
  modified_base 21: mod_base = cm
  source 1..21: mol_type = other RNA
agacgtttattggttgtgacc

SEQ ID NO: 690 - RNA, 21 nt, synthetic construct
  modified_base 1: mod_base = OTHER; note = 5'-cyclopropyl phosphonate-2'-O-methylinosine
  modified_base 1^2: mod_base = OTHER; note = phosphorothioate linkage
  modified_base 2: mod_base = OTHER; note = 2'-fluoroguanosine
  modified_base 2^3: mod_base = OTHER; note = phosphorothioate linkage
  modified_base 3: mod_base = OTHER; note = 2'-O-methyladenosine
  modified_base 4: mod_base = cm
  modified_base 5: mod_base = gm
  modified_base 6: mod_base = um
  modified_base 7: mod_base = um
  modified_base 8: mod_base = um
  modified_base 9: mod_base = OTHER; note = 2'-O-methyladenosine
  modified_base 10: mod_base = OTHER; note = 2'-fluorouridine
  modified_base 11: mod_base = um
  modified_base 12: mod_base = OTHER; note = 2'-fluoroguanosine
  modified_base 13: mod_base = gm
  modified_base 14: mod_base = OTHER; note = 2'-fluorouridine
  modified_base 15: mod_base = um
  modified_base 16: mod_base = OTHER; note = 2'-fluoroguanosine
  modified_base 17: mod_base = um
  modified_base 18: mod_base = gm
  modified_base 19: mod_base = OTHER; note = 2'-O-methyladenosine
  modified_base 20: mod_base = cm
  modified_base 20^21: mod_base = OTHER; note = phosphorothioate linkage
  modified_base 20^21: mod_base = OTHER; note = phosphorothioate linkage
  modified_base 21: mod_base = cm
  source 1..21: mol_type = other RNA
ngacgtttattggttgtgacc

SEQ ID NO: 691 - RNA, 21 nt, synthetic construct
  modified_base 1: mod_base = OTHER; note = 5'-cyclopropyl phosphonate-2'-O-methyluridine
  modified_base 1^2: mod_base = OTHER; note = phosphorothioate linkage
  modified_base 2: mod_base = OTHER; note = 2'-fluoroguanosine
  modified_base 2^3: mod_base = OTHER; note = phosphorothioate linkage
  modified_base 3: mod_base = OTHER; note = 2'-O-methyladenosine
  modified_base 4: mod_base = cm
  modified_base 5: mod_base = gm
  modified_base 6: mod_base = um
  modified_base 7: mod_base = um
  modified_base 8: mod_base = um
  modified_base 9: mod_base = OTHER; note = 2'-O-methyladenosine
  modified_base 10: mod_base = OTHER; note = 2'-fluorouridine
  modified_base 11: mod_base = um
  modified_base 12: mod_base = OTHER; note = 2'-fluoroguanosine
  modified_base 13: mod_base = gm
  modified_base 14: mod_base = OTHER; note = 2'-fluorouridine
  modified_base 15: mod_base = um
  modified_base 16: mod_base = OTHER; note = 2'-fluoroguanosine
  modified_base 17: mod_base = um
  modified_base 18: mod_base = gm
  modified_base 19: mod_base = OTHER; note = 2'-O-methyladenosine
  modified_base 20: mod_base = cm
  modified_base 20^21: mod_base = OTHER; note = phosphorothioate linkage
  modified_base 20^21: mod_base = OTHER; note = phosphorothioate linkage
  modified_base 21: mod_base = cm
  source 1..21: mol_type = other RNA
tgacgtttattggttgtgacc

SEQ ID NO: 692 - RNA, 21 nt, synthetic construct
  modified_base 1: mod_base = OTHER; note = 5'-cyclopropyl phosphonate-2'-O-methyluridine
  modified_base 1^2: mod_base = OTHER; note = phosphorothioate linkage
  modified_base 2: mod_base = OTHER; note = 2'-fluoroguanosine
  modified_base 2^3: mod_base = OTHER; note = phosphorothioate linkage
  modified_base 3: mod_base = OTHER; note = 2'-O-methyladenosine
  modified_base 4: mod_base = cm
  modified_base 5: mod_base = OTHER; note = 2'-O-methyladenosine
  modified_base 6: mod_base = um
  modified_base 7: mod_base = um
  modified_base 8: mod_base = um
  modified_base 9: mod_base = OTHER; note = 2'-O-methyladenosine
  modified_base 10: mod_base = OTHER; note = 2'-fluorouridine
  modified_base 11: mod_base = um
  modified_base 12: mod_base = OTHER; note = 2'-fluoroguanosine
  modified_base 13: mod_base = gm
  modified_base 14: mod_base = OTHER; note = 2'-fluorouridine
  modified_base 15: mod_base = um
  modified_base 16: mod_base = OTHER; note = 2'-fluoroguanosine
  modified_base 17: mod_base = um
  modified_base 18: mod_base = gm
  modified_base 19: mod_base = OTHER; note = 2'-O-methyladenosine
  modified_base 20: mod_base = cm
  modified_base 20^21: mod_base = OTHER; note = phosphorothioate linkage
  modified_base 20^21: mod_base = OTHER; note = phosphorothioate linkage
  modified_base 21: mod_base = cm
  source 1..21: mol_type = other RNA
tgacatttattggttgtgacc

SEQ ID NO: 693 - RNA, 21 nt, synthetic construct
  modified_base 1: mod_base = OTHER; note = 5'-cyclopropyl phosphonate-2'-O-methyladenosine
  modified_base 1^2: mod_base = OTHER; note = phosphorothioate linkage
  modified_base 2: mod_base = OTHER; note = 2'-fluoroguanosine
  modified_base 2^3: mod_base = OTHER; note = phosphorothioate linkage
  modified_base 3: mod_base = OTHER; note = 2'-O-methyladenosine
  modified_base 4: mod_base = cm
  modified_base 5: mod_base = OTHER; note = 2'-O-methyladenosine
  modified_base 6: mod_base = um
  modified_base 7: mod_base = um
  modified_base 8: mod_base = um
  modified_base 9: mod_base = gm
  modified_base 10: mod_base = OTHER; note = 2'-fluorouridine
  modified_base 11: mod_base = um
  modified_base 12: mod_base = OTHER; note = 2'-fluoroguanosine
  modified_base 13: mod_base = gm
  modified_base 14: mod_base = OTHER; note = 2'-fluorouridine
  modified_base 15: mod_base = um
  modified_base 16: mod_base = OTHER; note = 2'-fluoroguanosine
  modified_base 17: mod_base = um
  modified_base 18: mod_base = gm
  modified_base 19: mod_base = OTHER; note = 2'-O-methyladenosine
  modified_base 20: mod_base = cm
  modified_base 20^21: mod_base = OTHER; note = phosphorothioate linkage
  modified_base 20^21: mod_base = OTHER; note = phosphorothioate linkage
  modified_base 21: mod_base = cm
  source 1..21: mol_type = other RNA
agacatttgttggttgtgacc

SEQ ID NO: 694 - RNA, 21 nt, synthetic construct
  modified_base 1: mod_base = OTHER; note = 5'-cyclopropyl phosphonate-2'-O-methyladenosine
  modified_base 1^2: mod_base = OTHER; note = phosphorothioate linkage
  modified_base 2: mod_base = OTHER; note = 2'-fluoroguanosine
  modified_base 2^3: mod_base = OTHER; note = phosphorothioate linkage
  modified_base 3: mod_base = OTHER; note = 2'-O-methyladenosine
  modified_base 4: mod_base = cm
  modified_base 5: mod_base = OTHER; note = 2'-O-methyladenosine
  modified_base 6: mod_base = um
  modified_base 7: mod_base = um
  modified_base 8: mod_base = um
  modified_base 9: mod_base = gm
  modified_base 10: mod_base = OTHER; note = 2'-fluorouridine
  modified_base 11: mod_base = um
  modified_base 12: mod_base = OTHER; note = 2'-fluoroguanosine
  modified_base 13: mod_base = gm
  modified_base 14: mod_base = OTHER; note = 2'-fluorouridine
  modified_base 15: mod_base = um
  modified_base 16: mod_base = OTHER; note = 2'-fluoroguanosine
  modified_base 17: mod_base = um
  modified_base 18: mod_base = gm
  modified_base 19: mod_base = OTHER; note = 2'-O-methyladenosine
  modified_base 20: mod_base = cm
  modified_base 20^21: mod_base = OTHER; note = phosphorothioate linkage
  modified_base 20^21: mod_base = OTHER; note = phosphorothioate linkage
  modified_base 21: mod_base = um
  source 1..21: mol_type = other RNA
agacatttgttggttgtgact

SEQ ID NO: 695 - RNA, 21 nt, synthetic construct
  modified_base 1: mod_base = OTHER; note = 5'-cyclopropyl phosphonate-2'-O-methyluridine
  modified_base 1^2: mod_base = OTHER; note = phosphorothioate linkage
  modified_base 2: mod_base = OTHER; note = 2'-fluoroguanosine
  modified_base 2^3: mod_base = OTHER; note = phosphorothioate linkage
  modified_base 3: mod_base = OTHER; note = 2'-O-methyladenosine
  modified_base 4: mod_base = cm
  modified_base 5: mod_base = OTHER; note = 2'-O-methyladenosine
  modified_base 6: mod_base = um
  modified_base 7: mod_base = um
  modified_base 8: mod_base = um
  modified_base 9: mod_base = gm
  modified_base 10: mod_base = OTHER; note = 2'-fluorouridine
  modified_base 11: mod_base = um
  modified_base 12: mod_base = OTHER; note = 2'-fluoroguanosine
  modified_base 13: mod_base = gm
  modified_base 14: mod_base = OTHER; note = 2'-fluorouridine
  modified_base 15: mod_base = um
  modified_base 16: mod_base = OTHER; note = 2'-fluoroguanosine
  modified_base 17: mod_base = um
  modified_base 18: mod_base = gm
  modified_base 19: mod_base = OTHER; note = 2'-O-methyladenosine
  modified_base 20: mod_base = cm
  modified_base 20^21: mod_base = OTHER; note = phosphorothioate linkage
  modified_base 20^21: mod_base = OTHER; note = phosphorothioate linkage
  modified_base 21: mod_base = cm
  source 1..21: mol_type = other RNA
tgacatttgttggttgtgacc

SEQ ID NO: 696 - RNA, 21 nt, synthetic construct
  modified_base 1: mod_base = OTHER; note = 5'-cyclopropyl phosphonate-2'-O-methyladenosine
  modified_base 1^2: mod_base = OTHER; note = phosphorothioate linkage
  modified_base 2: mod_base = OTHER; note = 2'-fluoroguanosine
  modified_base 2^3: mod_base = OTHER; note = phosphorothioate linkage
  modified_base 3: mod_base = OTHER; note = 2'-O-methyladenosine
  modified_base 4: mod_base = cm
  modified_base 5: mod_base = gm
  modified_base 6: mod_base = um
  modified_base 7: mod_base = um
  modified_base 8: mod_base = um
  modified_base 9: mod_base = OTHER; note = 2'-O-methyladenosine
  modified_base 10: mod_base = OTHER; note = 2'-fluorouridine
  modified_base 11: mod_base = um
  modified_base 12: mod_base = OTHER; note = 2'-fluoroguanosine
  modified_base 13: mod_base = gm
  modified_base 14: mod_base = OTHER; note = 2'-fluorouridine
  modified_base 15: mod_base = um
  modified_base 16: mod_base = OTHER; note = 2'-fluoroguanosine
  modified_base 17: mod_base = um
  modified_base 18: mod_base = gm
  modified_base 19: mod_base = OTHER; note = 2'-O-methyladenosine
  modified_base 20: mod_base = cm
  modified_base 20^21: mod_base = OTHER; note = phosphorothioate linkage
  modified_base 20^21: mod_base = OTHER; note = phosphorothioate linkage
  modified_base 21: mod_base = um
  source 1..21: mol_type = other RNA
agacgtttattggttgtgact

SEQ ID NO: 697 - RNA, 21 nt, synthetic construct
  modified_base 1: mod_base = OTHER; note = 5'-cyclopropyl phosphonate-2'-O-methyluridine
  modified_base 1^2: mod_base = OTHER; note = phosphorothioate linkage
  modified_base 2: mod_base = OTHER; note = 2'-fluoroguanosine
  modified_base 2^3: mod_base = OTHER; note = phosphorothioate linkage
  modified_base 3: mod_base = OTHER; note = 2'-O-methyladenosine
  modified_base 4: mod_base = cm
  modified_base 5: mod_base = gm
  modified_base 6: mod_base = um
  modified_base 7: mod_base = um
  modified_base 8: mod_base = um
  modified_base 9: mod_base = OTHER; note = 2'-O-methyladenosine
  modified_base 10: mod_base = OTHER; note = 2'-fluorouridine
  modified_base 11: mod_base = um
  modified_base 12: mod_base = OTHER; note = 2'-fluoroguanosine
  modified_base 13: mod_base = gm
  modified_base 14: mod_base = OTHER; note = 2'-fluorouridine
  modified_base 15: mod_base = um
  modified_base 16: mod_base = OTHER; note = 2'-fluoroguanosine
  modified_base 17: mod_base = um
  modified_base 18: mod_base = gm
  modified_base 19: mod_base = OTHER; note = 2'-O-methyladenosine
  modified_base 20: mod_base = cm
  modified_base 20^21: mod_base = OTHER; note = phosphorothioate linkage
  modified_base 21: mod_base = um
  source 1..21: mol_type = other RNA
tgacgtttattggttgtgact

SEQ ID NO: 698 - RNA, 21 nt, synthetic construct
  modified_base 1: mod_base = cm
  modified_base 1^2: mod_base = OTHER; note = phosphorothioate linkage
  modified_base 2: mod_base = OTHER; note = 2'-O-methyl-2-aminoadenosine
  modified_base 3: mod_base = um
  modified_base 4: mod_base = um
  modified_base 5: mod_base = gm
  modified_base 6: mod_base = cm
  modified_base 7: mod_base = cm
  modified_base 8: mod_base = um
  modified_base 9: mod_base = OTHER; note = 2'-fluorouridine
  modified_base 10: mod_base = OTHER; note = 2'-fluoroadenosine
  modified_base 11: mod_base = OTHER; note = 2'-fluorocytidine
  modified_base 12: mod_base = um
  modified_base 13: mod_base = gm
  modified_base 14: mod_base = OTHER; note = 2'-O-methyladenosine
  modified_base 15: mod_base = OTHER; note = 2'-O-methyladenosine
  modified_base 16: mod_base = OTHER; note = 2'-O-methyladenosine
  modified_base 17: mod_base = um
  modified_base 18: mod_base = cm
  modified_base 19: mod_base = cm
  modified_base 20: mod_base = OTHER; note = 2'-O-methyladenosine
  modified_base 21: mod_base = OTHER; note = 2'-O-methyladenosine
  source 1..21: mol_type = other RNA
cnttgccttactgaaatccaa

SEQ ID NO: 699 - RNA, 21 nt, synthetic construct
  modified_base 1: mod_base = gm
  modified_base 1^2: mod_base = OTHER; note = phosphorothioate linkage
  modified_base 2: mod_base = OTHER; note = 2'-O-methyl-2-aminoadenosine
  modified_base 3: mod_base = OTHER; note = 2'-O-methyladenosine
  modified_base 4: mod_base = OTHER; note = 2'-O-methyladenosine
  modified_base 5: mod_base = um
  modified_base 6: mod_base = cm
  modified_base 7: mod_base = cm
  modified_base 8: mod_base = OTHER; note = 2'-O-methyladenosine
  modified_base 9: mod_base = OTHER; note = 2'-fluoroguanosine
  modified_base 10: mod_base = OTHER; note = 2'-fluoroadenosine
  modified_base 11: mod_base = OTHER; note = 2'-fluoroguanosine
  modified_base 12: mod_base = cm
  modified_base 13: mod_base = cm
  modified_base 14: mod_base = um
  modified_base 15: mod_base = OTHER; note = 2'-O-methyladenosine
  modified_base 16: mod_base = OTHER; note = 2'-O-methyladenosine
  modified_base 17: mod_base = cm
  modified_base 18: mod_base = cm
  modified_base 19: mod_base = um
  modified_base 20: mod_base = um
  modified_base 21: mod_base = OTHER; note = 2'-O-methyladenosine
  source 1..21: mol_type = other RNA
gnaatccagagcctaacctta

SEQ ID NO: 700 - RNA, 21 nt, synthetic construct
  modified_base 1: mod_base = gm
  modified_base 1^2: mod_base = OTHER; note = phosphorothioate linkage
  modified_base 2: mod_base = OTHER; note = 2'-O-methyladenosine
  modified_base 3: mod_base = um
  modified_base 4: mod_base = um
  modified_base 5: mod_base = cm
  modified_base 6: mod_base = gm
  modified_base 7: mod_base = gm
  modified_base 8: mod_base = OTHER; note = 2'-O-methyladenosine
  modified_base 9: mod_base = OTHER; note = 2'-fluoroadenosine
  modified_base 10: mod_base = OTHER; note = 2'-fluoroadenosine
  modified_base 11: mod_base = OTHER; note = 2'-fluorocytidine
  modified_base 12: mod_base = um
  modified_base 13: mod_base = cm
  modified_base 14: mod_base = OTHER; note = 2'-O-methyladenosine
  modified_base 15: mod_base = gm
  modified_base 16: mod_base = OTHER; note = 2'-O-methyladenosine
  modified_base 17: mod_base = um
  modified_base 18: mod_base = OTHER; note = 2'-O-methyladenosine
  modified_base 19: mod_base = OTHER; note = 2'-O-methyladenosine
  modified_base 20: mod_base = OTHER; note = 2'-O-methyl-2-aminoadenosine
  modified_base 21: mod_base = um
  source 1..21: mol_type = other RNA
gattcggaaactcagataant

SEQ ID NO: 701 - RNA, 21 nt, synthetic construct
  modified_base 1: mod_base = OTHER; note = 2'-O-methyl-2-aminoadenosine
  modified_base 1^2: mod_base = OTHER; note = phosphorothioate linkage
  modified_base 2: mod_base = OTHER; note = 2'-O-methyladenosine
  modified_base 3: mod_base = gm
  modified_base 4: mod_base = um
  modified_base 5: mod_base = cm
  modified_base 6: mod_base = OTHER; note = 2'-O-methyladenosine
  modified_base 7: mod_base = cm
  modified_base 8: mod_base = OTHER; note = 2'-O-methyladenosine
  modified_base 9: mod_base = OTHER; note = 2'-fluoroadenosine
  modified_base 10: mod_base = OTHER; note = 2'-fluorocytidine
  modified_base 11: mod_base = OTHER; note = 2'-fluorocytidine
  modified_base 12: mod_base = OTHER; note = 2'-O-methyladenosine
  modified_base 13: mod_base = OTHER; note = 2'-O-methyladenosine
  modified_base 14: mod_base = um
  modified_base 15: mod_base = OTHER; note = 2'-O-methyladenosine
  modified_base 16: mod_base = OTHER; note = 2'-O-methyladenosine
  modified_base 17: mod_base = OTHER; note = 2'-O-methyladenosine
  modified_base 18: mod_base = um
  modified_base 19: mod_base = gm
  modified_base 20: mod_base = um
  modified_base 21: mod_base = OTHER; note = 2'-O-methyladenosine
  source 1..21: mol_type = other RNA
nagtcacaaccaataaatgta

SEQ ID NO: 702 - RNA, 21 nt, synthetic construct
  modified_base 1: mod_base = OTHER; note = 2'-O-methyladenosine
  modified_base 1^2: mod_base = OTHER; note = phosphorothioate linkage
  modified_base 2: mod_base = gm
  modified_base 3: mod_base = um
  modified_base 4: mod_base = cm
  modified_base 5: mod_base = OTHER; note = 2'-O-methyladenosine
  modified_base 6: mod_base = cm
  modified_base 7: mod_base = OTHER; note = 2'-O-methyladenosine
  modified_base 8: mod_base = OTHER; note = 2'-O-methyladenosine
  modified_base 9: mod_base = OTHER; note = 2'-fluorocytidine
  modified_base 10: mod_base = OTHER; note = 2'-fluorocytidine
  modified_base 11: mod_base = OTHER; note = 2'-fluoroadenosine
  modified_base 12: mod_base = OTHER; note = 2'-O-methyladenosine
  modified_base 13: mod_base = um
  modified_base 14: mod_base = OTHER; note = 2'-O-methyladenosine
  modified_base 15: mod_base = OTHER; note = 2'-O-methyladenosine
  modified_base 16: mod_base = OTHER; note = 2'-O-methyladenosine
  modified_base 17: mod_base = um
  modified_base 18: mod_base = gm
  modified_base 19: mod_base = um
  modified_base 20: mod_base = cm
  modified_base 21: mod_base = um
  source 1..21: mol_type = other RNA
agtcacaaccaataaatgtct

SEQ ID NO: 703 - RNA, 21 nt, synthetic construct
  modified_base 1: mod_base = gm
  modified_base 1^2: mod_base = OTHER; note = phosphorothioate linkage
  modified_base 2: mod_base = OTHER; note = 2'-O-methyladenosine
  modified_base 3: mod_base = OTHER; note = 2'-O-methyladenosine
  modified_base 4: mod_base = OTHER; note = 2'-O-methyladenosine
  modified_base 5: mod_base = gm
  modified_base 6: mod_base = um
  modified_base 7: mod_base = cm
  modified_base 8: mod_base = OTHER; note = 2'-O-methyladenosine
  modified_base 9: mod_base = OTHER; note = 2'-fluorocytidine
  modified_base 10: mod_base = OTHER; note = 2'-fluoroadenosine
  modified_base 11: mod_base = OTHER; note = 2'-fluoroadenosine
  modified_base 12: mod_base = cm
  modified_base 13: mod_base = cm
  modified_base 14: mod_base = OTHER; note = 2'-O-methyladenosine
  modified_base 15: mod_base = OTHER; note = 2'-O-methyladenosine
  modified_base 16: mod_base = um
  modified_base 17: mod_base = OTHER; note = 2'-O-methyladenosine
  modified_base 18: mod_base = OTHER; note = 2'-O-methyladenosine
  modified_base 19: mod_base = OTHER; note = 2'-O-methyl-2-aminoadenosine
  modified_base 20: mod_base = um
  modified_base 21: mod_base = OTHER; note = 2'-O-methyladenosine
  source 1..21: mol_type = other RNA
gaaagtcacaaccaataanta

SEQ ID NO: 704 - RNA, 21 nt, synthetic construct
  modified_base 1: mod_base = gm
  modified_base 1^2: mod_base = OTHER; note = phosphorothioate linkage
  modified_base 2: mod_base = gm
  modified_base 3: mod_base = OTHER; note = 2'-O-methyladenosine
  modified_base 4: mod_base = OTHER; note = 2'-O-methyladenosine
  modified_base 5: mod_base = OTHER; note = 2'-O-methyladenosine
  modified_base 6: mod_base = cm
  modified_base 7: mod_base = um
  modified_base 8: mod_base = cm
  modified_base 9: mod_base = OTHER; note = 2'-fluoroadenosine
  modified_base 10: mod_base = OTHER; note = 2'-fluoroguanosine
  modified_base 11: mod_base = OTHER; note = 2'-fluoroadenosine
  modified_base 12: mod_base = um
  modified_base 13: mod_base = OTHER; note = 2'-O-methyladenosine
  modified_base 14: mod_base = OTHER; note = 2'-O-methyladenosine
  modified_base 15: mod_base = OTHER; note = 2'-O-methyladenosine
  modified_base 16: mod_base = um
  modified_base 17: mod_base = gm
  modified_base 18: mod_base = cm
  modified_base 19: mod_base = um
  modified_base 20: mod_base = OTHER; note = 2'-O-methyladenosine
  modified_base 21: mod_base = OTHER; note = 2'-O-methyladenosine
  source 1..21: mol_type = other RNA
ggaaactcagataaatgctaa

SEQ ID NO: 705 - RNA, 21 nt, synthetic construct
  modified_base 1: mod_base = OTHER; note = 2'-O-methyladenosine
  modified_base 1^2: mod_base = OTHER; note = phosphorothioate linkage
  modified_base 2: mod_base = um
  modified_base 3: mod_base = cm
  modified_base 4: mod_base = cm
  modified_base 5: mod_base = OTHER; note = 2'-O-methyladenosine
  modified_base 6: mod_base = gm
  modified_base 7: mod_base = OTHER; note = 2'-O-methyladenosine
  modified_base 8: mod_base = gm
  modified_base 9: mod_base = OTHER; note = 2'-fluorocytidine
  modified_base 10: mod_base = OTHER; note = 2'-fluorocytidine
  modified_base 11: mod_base = OTHER; note = 2'-fluorouridine
  modified_base 12: mod_base = OTHER; note = 2'-O-methyladenosine
  modified_base 13: mod_base = OTHER; note = 2'-O-methyladenosine
  modified_base 14: mod_base = cm
  modified_base 15: mod_base = cm
  modified_base 16: mod_base = um
  modified_base 17: mod_base = um
  modified_base 18: mod_base = cm
  modified_base 19: mod_base = OTHER; note = 2'-O-methyladenosine
  modified_base 20: mod_base = OTHER; note = 2'-O-methyladenosine
  modified_base 21: mod_base = um
  source 1..21: mol_type = other RNA
atccagagcctaaccttcaat

SEQ ID NO: 706 - RNA, 21 nt, synthetic construct
  modified_base 1: mod_base = um
  modified_base 1^2: mod_base = OTHER; note = phosphorothioate linkage
  modified_base 2: mod_base = OTHER; note = 2'-O-methyl-2-aminoadenosine
  modified_base 3: mod_base = cm
  modified_base 4: mod_base = um
  modified_base 5: mod_base = gm
  modified_base 6: mod_base = OTHER; note = 2'-O-methyladenosine
  modified_base 7: mod_base = OTHER; note = 2'-O-methyladenosine
  modified_base 8: mod_base = OTHER; note = 2'-O-methyladenosine
  modified_base 9: mod_base = OTHER; note = 2'-fluorouridine
  modified_base 10: mod_base = OTHER; note = 2'-fluorocytidine
  modified_base 11: mod_base = OTHER; note = 2'-fluorocytidine
  modified_base 12: mod_base = OTHER; note = 2'-O-methyladenosine
  modified_base 13: mod_base = gm
  modified_base 14: mod_base = OTHER; note = 2'-O-methyladenosine
  modified_base 15: mod_base = gm
  modified_base 16: mod_base = cm
  modified_base 17: mod_base = cm
  modified_base 18: mod_base = um
  modified_base 19: mod_base = OTHER; note = 2'-O-methyladenosine
  modified_base 20: mod_base = OTHER; note = 2'-O-methyladenosine
  modified_base 21: mod_base = OTHER; note = 2'-O-methyladenosine
  source 1..21: mol_type = other RNA
tnctgaaatccagagcctaaa

SEQ ID NO: 707 - RNA, 21 nt, synthetic construct
  modified_base 1: mod_base = gm
  modified_base 1^2: mod_base = OTHER; note = phosphorothioate linkage
  modified_base 2: mod_base = gm
  modified_base 3: mod_base = OTHER; note = 2'-O-methyladenosine
  modified_base 4: mod_base = OTHER; note = 2'-O-methyladenosine
  modified_base 5: mod_base = OTHER; note = 2'-O-methyladenosine
  modified_base 6: mod_base = cm
  modified_base 7: mod_base = um
  modified_base 8: mod_base = cm
  modified_base 9: mod_base = OTHER; note = 2'-fluoroadenosine
  modified_base 10: mod_base = gm
  modified_base 11: mod_base = OTHER; note = 2'-fluoroadenosine
  modified_base 12: mod_base = um
  modified_base 13: mod_base = OTHER; note = 2'-fluoroadenosine
  modified_base 14: mod_base = OTHER; note = 2'-O-methyladenosine
  modified_base 15: mod_base = OTHER; note = 2'-O-methyladenosine
  modified_base 16: mod_base = um
  modified_base 17: mod_base = gm
  modified_base 18: mod_base = cm
  modified_base 19: mod_base = um
  modified_base 20: mod_base = OTHER; note = 2'-O-methyladenosine
  modified_base 21: mod_base = OTHER; note = 2'-O-methyladenosine
  source 1..21: mol_type = other RNA
ggaaactcagataaatgctaa

SEQ ID NO: 708 - RNA, 21 nt, synthetic construct
  modified_base 1: mod_base = OTHER; note = 2'-O-methyladenosine
  modified_base 1^2: mod_base = OTHER; note = phosphorothioate linkage
  modified_base 2: mod_base = gm
  modified_base 3: mod_base = um
  modified_base 4: mod_base = cm
  modified_base 5: mod_base = OTHER; note = 2'-O-methyladenosine
  modified_base 6: mod_base = cm
  modified_base 7: mod_base = OTHER; note = 2'-O-methyladenosine
  modified_base 8: mod_base = OTHER; note = 2'-O-methyladenosine
  modified_base 9: mod_base = OTHER; note = 2'-fluorocytidine
  modified_base 10: mod_base = cm
  modified_base 11: mod_base = OTHER; note = 2'-fluoroadenosine
  modified_base 12: mod_base = OTHER; note = 2'-O-methyladenosine
  modified_base 13: mod_base = OTHER; note = 2'-fluorouridine
  modified_base 14: mod_base = OTHER; note = 2'-O-methyladenosine
  modified_base 15: mod_base = OTHER; note = 2'-O-methyladenosine
  modified_base 16: mod_base = OTHER; note = 2'-O-methyladenosine
  modified_base 17: mod_base = um
  modified_base 18: mod_base = gm
  modified_base 19: mod_base = um
  modified_base 20: mod_base = cm
  modified_base 21: mod_base = um
  source 1..21: mol_type = other RNA
agtcacaaccaataaatgtct

SEQ ID NO: 709 - RNA, 21 nt, synthetic construct
  modified_base 1: mod_base = OTHER; note = 2'-O-methyladenosine
  modified_base 1^2: mod_base = OTHER; note = phosphorothioate linkage
  modified_base 2: mod_base = gm
  modified_base 3: mod_base = OTHER; note = 2'-O-methyladenosine
  modified_base 4: mod_base = gm
  modified_base 5: mod_base = cm
  modified_base 6: mod_base = cm
  modified_base 7: mod_base = um
  modified_base 8: mod_base = OTHER; note = 2'-O-methyladenosine
  modified_base 9: mod_base = OTHER; note = 2'-fluoroadenosine
  modified_base 10: mod_base = OTHER; note = 2'-fluorocytidine
  modified_base 11: mod_base = OTHER; note = 2'-fluorocytidine
  modified_base 12: mod_base = um
  modified_base 13: mod_base = um
  modified_base 14: mod_base = cm
  modified_base 15: mod_base = OTHER; note = 2'-O-methyladenosine
  modified_base 16: mod_base = OTHER; note = 2'-O-methyladenosine
  modified_base 17: mod_base = um
  modified_base 18: mod_base = cm
  modified_base 19: mod_base = um
  modified_base 20: mod_base = cm
  modified_base 21: mod_base = OTHER; note = 2'-O-methyladenosine
  source 1..21: mol_type = other RNA
agagcctaaccttcaatctca

SEQ ID NO: 710 - RNA, 21 nt, synthetic construct
  modified_base 1: mod_base = OTHER; note = 2'-O-methyladenosine
  modified_base 1^2: mod_base = OTHER; note = phosphorothioate linkage
  modified_base 2: mod_base = gm
  modified_base 3: mod_base = OTHER; note = 2'-O-methyladenosine
  modified_base 4: mod_base = gm
  modified_base 5: mod_base = cm
  modified_base 6: mod_base = cm
  modified_base 7: mod_base = um
  modified_base 8: mod_base = OTHER; note = 2'-O-methyladenosine
  modified_base 9: mod_base = OTHER; note = 2'-fluoroadenosine
  modified_base 10: mod_base = OTHER; note = 2'-fluorocytidine
  modified_base 11: mod_base = OTHER; note = 2'-fluorocytidine
  modified_base 12: mod_base = um
  modified_base 13: mod_base = um
  modified_base 14: mod_base = cm
  modified_base 15: mod_base = OTHER; note = 2'-O-methyladenosine
  modified_base 16: mod_base = OTHER; note = 2'-O-methyladenosine
  modified_base 17: mod_base = um
  modified_base 18: mod_base = cm
  modified_base 19: mod_base = cm
  modified_base 20: mod_base = cm
  modified_base 21: mod_base = OTHER; note = 2'-O-methyladenosine
  source 1..21: mol_type = other RNA
agagcctaaccttcaatccca

SEQ ID NO: 711 - RNA, 21 nt, synthetic construct
  modified_base 1: mod_base = gm
  modified_base 1^2: mod_base = OTHER; note = phosphorothioate linkage
  modified_base 2: mod_base = gm
  modified_base 3: mod_base = OTHER; note = 2'-O-methyladenosine
  modified_base 4: mod_base = OTHER; note = 2'-O-methyladenosine
  modified_base 5: mod_base = OTHER; note = 2'-O-methyladenosine
  modified_base 6: mod_base = cm
  modified_base 7: mod_base = um
  modified_base 8: mod_base = cm
  modified_base 9: mod_base = OTHER; note = adenosine
  modified_base 10: mod_base = gm
  modified_base 11: mod_base = OTHER; note = adenosine
  modified_base 12: mod_base = um
  modified_base 13: mod_base = OTHER; note = adenosine
  modified_base 14: mod_base = OTHER; note = 2'-O-methyladenosine
  modified_base 15: mod_base = OTHER; note = 2'-O-methyladenosine
  modified_base 16: mod_base = um
  modified_base 17: mod_base = gm
  modified_base 18: mod_base = cm
  modified_base 19: mod_base = um
  modified_base 20: mod_base = OTHER; note = 2'-O-methyladenosine
  modified_base 21: mod_base = OTHER; note = 2'-O-methyladenosine
  source 1..21: mol_type = other RNA
ggaaactcagataaatgctaa

SEQ ID NO: 712 - RNA, 19 nt, synthetic construct
  modified_base 1: mod_base = gm
  modified_base 1^2: mod_base = OTHER; note = phosphorothioate linkage
  modified_base 2: mod_base = OTHER; note = 2'-O-methyl-2-aminoadenosine
  modified_base 3: mod_base = OTHER; note = 2'-O-methyladenosine
  modified_base 4: mod_base = cm
  modified_base 5: mod_base = um
  modified_base 6: mod_base = cm
  modified_base 7: mod_base = OTHER; note = 2'-fluoroadenosine
  modified_base 8: mod_base = OTHER; note = 2'-fluoroguanosine
  modified_base 9: mod_base = OTHER; note = 2'-fluoroadenosine
  modified_base 10: mod_base = um
  modified_base 11: mod_base = OTHER; note = 2'-O-methyladenosine
  modified_base 12: mod_base = OTHER; note = 2'-O-methyladenosine
  modified_base 13: mod_base = OTHER; note = 2'-O-methyladenosine
  modified_base 14: mod_base = um
  modified_base 15: mod_base = gm
  modified_base 16: mod_base = cm
  modified_base 17: mod_base = um
  modified_base 18: mod_base = OTHER; note = 2'-O-methyladenosine
  modified_base 19: mod_base = OTHER; note = 2'-O-methyladenosine
  source 1..19: mol_type = other RNA
gnactcagataaatgctaa

SEQ ID NO: 713 - RNA, 21 nt, synthetic construct
  modified_base 1: mod_base = OTHER; note = 2'-O-methyladenosine
  modified_base 1^2: mod_base = OTHER; note = phosphorothioate linkage
  modified_base 2: mod_base = gm
  modified_base 3: mod_base = um
  modified_base 4: mod_base = cm
  modified_base 5: mod_base = OTHER; note = 2'-O-methyladenosine
  modified_base 6: mod_base = cm
  modified_base 7: mod_base = OTHER; note = 2'-fluoroadenosine
  modified_base 8: mod_base = OTHER; note = 2'-O-methyladenosine
  modified_base 9: mod_base = OTHER; note = 2'-fluorocytidine
  modified_base 10: mod_base = cm
  modified_base 11: mod_base = OTHER; note = 2'-fluoroadenosine
  modified_base 12: mod_base = OTHER; note = 2'-O-methyladenosine
  modified_base 13: mod_base = um
  modified_base 14: mod_base = OTHER; note = 2'-O-methyladenosine
  modified_base 15: mod_base = OTHER; note = 2'-O-methyladenosine
  modified_base 16: mod_base = OTHER; note = 2'-O-methyladenosine
  modified_base 17: mod_base = um
  modified_base 18: mod_base = gm
  modified_base 19: mod_base = um
  modified_base 20: mod_base = cm
  modified_base 21: mod_base = um
  source 1..21: mol_type = other RNA
agtcacaaccaataaatgtct

SEQ ID NO: 714 - RNA, 21 nt, synthetic construct
  modified_base 1: mod_base = gm
  modified_base 1^2: mod_base = OTHER; note = phosphorothioate linkage
  modified_base 2: mod_base = gm
  modified_base 3: mod_base = um
  modified_base 4: mod_base = cm
  modified_base 5: mod_base = OTHER; note = 2'-O-methyladenosine
  modified_base 6: mod_base = cm
  modified_base 7: mod_base = OTHER; note = 2'-O-methyladenosine
  modified_base 8: mod_base = OTHER; note = 2'-O-methyladenosine
  modified_base 9: mod_base = OTHER; note = 2'-fluorocytidine
  modified_base 10: mod_base = OTHER; note = 2'-fluorocytidine
  modified_base 11: mod_base = OTHER; note = 2'-fluoroadenosine
  modified_base 12: mod_base = OTHER; note = 2'-O-methyladenosine
  modified_base 13: mod_base = um
  modified_base 14: mod_base = OTHER; note = 2'-O-methyladenosine
  modified_base 15: mod_base = OTHER; note = 2'-O-methyladenosine
  modified_base 16: mod_base = OTHER; note = 2'-O-methyladenosine
  modified_base 17: mod_base = um
  modified_base 18: mod_base = gm
  modified_base 19: mod_base = um
  modified_base 20: mod_base = cm
  modified_base 21: mod_base = um
  source 1..21: mol_type = other RNA
ggtcacaaccaataaatgtct

SEQ ID NO: 715 - RNA, 21 nt, synthetic construct
  modified_base 1: mod_base = gm
  modified_base 1^2: mod_base = OTHER; note = phosphorothioate linkage
  modified_base 2: mod_base = gm
  modified_base 3: mod_base = um
  modified_base 4: mod_base = cm
  modified_base 5: mod_base = OTHER; note = 2'-O-methyladenosine
  modified_base 6: mod_base = cm
  modified_base 7: mod_base = OTHER; note = 2'-O-methyladenosine
  modified_base 8: mod_base = OTHER; note = 2'-O-methyladenosine
  modified_base 9: mod_base = OTHER; note = 2'-fluorocytidine
  modified_base 10: mod_base = OTHER; note = 2'-fluorocytidine
  modified_base 11: mod_base = OTHER; note = 2'-fluoroadenosine
  modified_base 12: mod_base = OTHER; note = 2'-O-methyladenosine
  modified_base 13: mod_base = um
  modified_base 14: mod_base = OTHER; note = 2'-O-methyladenosine
  modified_base 15: mod_base = OTHER; note = 2'-O-methyladenosine
  modified_base 16: mod_base = OTHER; note = 2'-O-methyladenosine
  modified_base 17: mod_base = um
  modified_base 18: mod_base = gm
  modified_base 19: mod_base = um
  modified_base 20: mod_base = cm
  modified_base 21: mod_base = OTHER; note = 2'-O-methyladenosine
  source 1..21: mol_type = other RNA
ggtcacaaccaataaatgtca

SEQ ID NO: 716 - RNA, 21 nt, synthetic construct
  modified_base 1: mod_base = OTHER; note = 2'-O-methyladenosine
  modified_base 1^2: mod_base = OTHER; note = phosphorothioate linkage
  modified_base 2: mod_base = gm
  modified_base 3: mod_base = um
  modified_base 4: mod_base = cm
  modified_base 5: mod_base = OTHER; note = 2'-O-methyladenosine
  modified_base 6: mod_base = cm
  modified_base 7: mod_base = OTHER; note = 2'-O-methyladenosine
  modified_base 8: mod_base = OTHER; note = 2'-O-methyladenosine
  modified_base 9: mod_base = OTHER; note = 2'-fluorocytidine
  modified_base 10: mod_base = OTHER; note = 2'-fluorocytidine
  modified_base 11: mod_base = OTHER; note = 2'-fluoroadenosine
  modified_base 12: mod_base = OTHER; note = 2'-O-methyladenosine
  modified_base 13: mod_base = um
  modified_base 14: mod_base = OTHER; note = 2'-O-methyladenosine
  modified_base 15: mod_base = OTHER; note = 2'-O-methyladenosine
  modified_base 16: mod_base = OTHER; note = 2'-O-methyladenosine
  modified_base 17: mod_base = um
  modified_base 18: mod_base = gm
  modified_base 19: mod_base = um
  modified_base 20: mod_base = cm
  modified_base 21: mod_base = OTHER; note = 2'-O-methyladenosine
  source 1..21: mol_type = other RNA
agtcacaaccaataaatgtca

SEQ ID NO: 717 - RNA, 21 nt, synthetic construct
  modified_base 1: mod_base = OTHER; note = 2'-O-methyl-2-aminoadenosine
  modified_base 1^2: mod_base = OTHER; note = phosphorothioate linkage
  modified_base 2: mod_base = OTHER; note = 2'-O-methyladenosine
  modified_base 3: mod_base = gm
  modified_base 4: mod_base = um
  modified_base 5: mod_base = cm
  modified_base 6: mod_base = OTHER; note = 2'-O-methyladenosine
  modified_base 7: mod_base = cm
  modified_base 8: mod_base = OTHER; note = 2'-O-methyladenosine
  modified_base 9: mod_base = OTHER; note = 2'-fluoroadenosine
  modified_base 10: mod_base = cm
  modified_base 11: mod_base = OTHER; note = 2'-fluorocytidine
  modified_base 12: mod_base = OTHER; note = 2'-O-methyladenosine
  modified_base 13: mod_base = OTHER; note = 2'-fluoroadenosine
  modified_base 14: mod_base = um
  modified_base 15: mod_base = OTHER; note = 2'-O-methyladenosine
  modified_base 16: mod_base = OTHER; note = 2'-O-methyladenosine
  modified_base 17: mod_base = OTHER; note = 2'-O-methyladenosine
  modified_base 18: mod_base = um
  modified_base 19: mod_base = gm
  modified_base 20: mod_base = um
  modified_base 21: mod_base = OTHER; note = 2'-O-methyladenosine
  source 1..21: mol_type = other RNA
nagtcacaaccaataaatgta

SEQ ID NO: 718 - RNA, 21 nt, synthetic construct
  modified_base 1: mod_base = gm
  modified_base 2: mod_base = gm
  modified_base 3: mod_base = um
  modified_base 4: mod_base = cm
  modified_base 5: mod_base = OTHER; note = 2'-O-methyladenosine
  modified_base 6: mod_base = cm
  modified_base 7: mod_base = OTHER; note = 2'-O-methyladenosine
  modified_base 8: mod_base = OTHER; note = 2'-O-methyladenosine
  modified_base 9: mod_base = OTHER; note = 2'-fluorocytidine
  modified_base 10: mod_base = OTHER; note = 2'-fluorocytidine
  modified_base 11: mod_base = OTHER; note = 2'-fluoroadenosine
  modified_base 12: mod_base = OTHER; note = 2'-O-methyladenosine
  modified_base 13: mod_base = um
  modified_base 14: mod_base = OTHER; note = 2'-O-methyladenosine
  modified_base 15: mod_base = OTHER; note = 2'-O-methyladenosine
  modified_base 16: mod_base = OTHER; note = 2'-O-methyladenosine
  modified_base 17: mod_base = um
  modified_base 18: mod_base = gm
  modified_base 19: mod_base = um
  modified_base 20: mod_base = cm
  modified_base 21: mod_base = um
  source 1..21: mol_type = other RNA
ggtcacaaccaataaatgtct

SEQ ID NO: 719 - RNA, 21 nt, synthetic construct
  modified_base 1: mod_base = OTHER; note = 2'-O-methyladenosine
  modified_base 1^2: mod_base = OTHER; note = phosphorothioate linkage
  modified_base 2: mod_base = gm
  modified_base 3: mod_base = um
  modified_base 4: mod_base = cm
  modified_base 5: mod_base = OTHER; note = 2'-O-methyladenosine
  modified_base 6: mod_base = cm
  modified_base 7: mod_base = OTHER; note = 2'-O-methyladenosine
  modified_base 8: mod_base = OTHER; note = 2'-O-methyladenosine
  modified_base 9: mod_base = OTHER; note = 2'-fluorocytidine
  modified_base 10: mod_base = OTHER; note = 2'-fluorocytidine
  modified_base 11: mod_base = OTHER; note = 2'-fluoroadenosine
  modified_base 12: mod_base = OTHER; note = 2'-O-methyladenosine
  modified_base 13: mod_base = um
  modified_base 14: mod_base = OTHER; note = 2'-O-methyladenosine
  modified_base 15: mod_base = OTHER; note = 2'-O-methyladenosine
  modified_base 16: mod_base = OTHER; note = 2'-O-methyladenosine
  modified_base 17: mod_base = um
  modified_base 18: mod_base = gm
  modified_base 19: mod_base = um
  modified_base 20: mod_base = cm
  modified_base 21: mod_base = cm
  source 1..21: mol_type = other RNA
agtcacaaccaataaatgtcc

SEQ ID NO: 720 - RNA, 21 nt, synthetic construct
  modified_base 1: mod_base = OTHER; note = 2'-O-methyladenosine
  modified_base 1^2: mod_base = OTHER; note = phosphorothioate linkage
  modified_base 2: mod_base = OTHER; note = 2'-O-methyladenosine
  modified_base 3: mod_base = gm
  modified_base 4: mod_base = gm
  modified_base 5: mod_base = cm
  modified_base 6: mod_base = um
  modified_base 7: mod_base = gm
  modified_base 8: mod_base = cm
  modified_base 9: mod_base = OTHER; note = 2'-fluorocytidine
  modified_base 10: mod_base = OTHER; note = 2'-fluorouridine
  modified_base 11: mod_base = OTHER; note = 2'-fluorouridine
  modified_base 12: mod_base = OTHER; note = 2'-O-methyladenosine
  modified_base 13: mod_base = gm
  modified_base 14: mod_base = cm
  modified_base 15: mod_base = um
  modified_base 16: mod_base = OTHER; note = 2'-O-methyladenosine
  modified_base 17: mod_base = um
  modified_base 18: mod_base = cm
  modified_base 19: mod_base = um
  modified_base 20: mod_base = gm
  modified_base 21: mod_base = OTHER; note = 2'-O-methyladenosine
  source 1..21: mol_type = other RNA
aaggctgccttagctatctga

SEQ ID NO: 721 - RNA, 21 nt, synthetic construct
  modified_base 1: mod_base = cm
  modified_base 1^2: mod_base = OTHER; note = phosphorothioate linkage
  modified_base 2: mod_base = gm
  modified_base 3: mod_base = cm
  modified_base 4: mod_base = um
  modified_base 5: mod_base = um
  modified_base 6: mod_base = cm
  modified_base 7: mod_base = OTHER; note = 2'-O-methyladenosine
  modified_base 8: mod_base = OTHER; note = 2'-O-methyladenosine
  modified_base 9: mod_base = OTHER; note = 2'-fluorouridine
  modified_base 10: mod_base = OTHER; note = 2'-fluorocytidine
  modified_base 11: mod_base = OTHER; note = 2'-fluoroguanosine
  modified_base 12: mod_base = OTHER; note = 2'-O-methyladenosine
  modified_base 13: mod_base = cm
  modified_base 14: mod_base = cm
  modified_base 15: mod_base = um
  modified_base 16: mod_base = um
  modified_base 17: mod_base = um
  modified_base 18: mod_base = OTHER; note = 2'-O-methyladenosine
  modified_base 19: mod_base = cm
  modified_base 20: mod_base = um
  modified_base 21: mod_base = OTHER; note = 2'-O-methyladenosine
  source 1..21: mol_type = other RNA
cgcttcaatcgacctttacta

SEQ ID NO: 722 - RNA, 21 nt, synthetic construct
  modified_base 1: mod_base = gm
  modified_base 1^2: mod_base = OTHER; note = phosphorothioate linkage
  modified_base 2: mod_base = OTHER; note = 2'-O-methyl-2-aminoadenosine
  modified_base 3: mod_base = OTHER; note = 2'-O-methyladenosine
  modified_base 4: mod_base = OTHER; note = 2'-O-methyladenosine
  modified_base 5: mod_base = cm
  modified_base 6: mod_base = OTHER; note = 2'-O-methyladenosine
  modified_base 7: mod_base = um
  modified_base 8: mod_base = um
  modified_base 9: mod_base = OTHER; note = 2'-fluoroadenosine
  modified_base 10: mod_base = OTHER; note = 2'-fluoroadenosine
  modified_base 11: mod_base = OTHER; note = 2'-fluorocytidine
  modified_base 12: mod_base = um
  modified_base 13: mod_base = cm
  modified_base 14: mod_base = um
  modified_base 15: mod_base = OTHER; note = 2'-O-methyladenosine
  modified_base 16: mod_base = OTHER; note = 2'-O-methyladenosine
  modified_base 17: mod_base = cm
  modified_base 18: mod_base = um
  modified_base 19: mod_base = gm
  modified_base 20: mod_base = um
  modified_base 21: mod_base = OTHER; note = 2'-O-methyladenosine
  source 1..21: mol_type = other RNA
gnaacattaactctaactgta

SEQ ID NO: 723 - RNA, 21 nt, synthetic construct
  modified_base 1: mod_base = OTHER; note = 2'-O-methyl-2-aminoadenosine
  modified_base 1^2: mod_base = OTHER; note = phosphorothioate linkage
  modified_base 2: mod_base = cm
  modified_base 3: mod_base = OTHER; note = 2'-O-methyladenosine
  modified_base 4: mod_base = gm
  modified_base 5: mod_base = OTHER; note = 2'-O-methyladenosine
  modified_base 6: mod_base = OTHER; note = 2'-O-methyladenosine
  modified_base 7: mod_base = gm
  modified_base 8: mod_base = OTHER; note = 2'-O-methyladenosine
  modified_base 9: mod_base = OTHER; note = 2'-fluoroguanosine
  modified_base 10: mod_base = OTHER; note = 2'-fluorouridine
  modified_base 11: mod_base = OTHER; note = 2'-fluorouridine
  modified_base 12: mod_base = um
  modified_base 13: mod_base = cm
  modified_base 14: mod_base = um
  modified_base 15: mod_base = um
  modified_base 16: mod_base = OTHER; note = 2'-O-methyladenosine
  modified_base 17: mod_base = OTHER; note = 2'-O-methyladenosine
  modified_base 18: mod_base = cm
  modified_base 19: mod_base = um
  modified_base 20: mod_base = um
  modified_base 21: mod_base = OTHER; note = 2'-O-methyladenosine
  source 1..21: mol_type = other RNA
ncagaagagtttcttaactta

SEQ ID NO: 724 - RNA, 21 nt, synthetic construct
  modified_base 1: mod_base = gm
  modified_base 1^2: mod_base = OTHER; note = phosphorothioate linkage
  modified_base 2: mod_base = um
  modified_base 3: mod_base = OTHER; note = 2'-O-methyladenosine
  modified_base 4: mod_base = cm
  modified_base 5: mod_base = um
  modified_base 6: mod_base = OTHER; note = 2'-O-methyladenosine
  modified_base 7: mod_base = cm
  modified_base 8: mod_base = um
  modified_base 9: mod_base = OTHER; note = 2'-fluorocytidine
  modified_base 10: mod_base = OTHER; note = 2'-fluorocytidine
  modified_base 11: mod_base = OTHER; note = 2'-fluorouridine
  modified_base 12: mod_base = cm
  modified_base 13: mod_base = OTHER; note = 2'-O-methyladenosine
  modified_base 14: mod_base = OTHER; note = 2'-O-methyladenosine
  modified_base 15: mod_base = OTHER; note = 2'-O-methyladenosine
  modified_base 16: mod_base = um
  modified_base 17: mod_base = gm
  modified_base 18: mod_base = um
  modified_base 19: mod_base = um
  modified_base 20: mod_base = gm
  modified_base 21: mod_base = OTHER; note = 2'-O-methyladenosine
  source 1..21: mol_type = other RNA
gtactactcctcaaatgttga

SEQ ID NO: 725 - RNA, 21 nt, synthetic construct
  modified_base 1: mod_base = cm
  modified_base 1^2: mod_base = OTHER; note = phosphorothioate linkage
  modified_base 2: mod_base = um
  modified_base 3: mod_base = um
  modified_base 4: mod_base = cm
  modified_base 5: mod_base = cm
  modified_base 6: mod_base = OTHER; note = 2'-O-methyladenosine
  modified_base 7: mod_base = um
  modified_base 8: mod_base = OTHER; note = 2'-O-methyladenosine
  modified_base 9: mod_base = OTHER; note = 2'-fluoroadenosine
  modified_base 10: mod_base = OTHER; note = 2'-fluorocytidine
  modified_base 11: mod_base = OTHER; note = 2'-fluoroadenosine
  modified_base 12: mod_base = um
  modified_base 13: mod_base = um
  modified_base 14: mod_base = gm
  modified_base 15: mod_base = OTHER; note = 2'-O-methyladenosine
  modified_base 16: mod_base = um
  modified_base 17: mod_base = gm
  modified_base 18: mod_base = OTHER; note = 2'-O-methyladenosine
  modified_base 19: mod_base = cm
  modified_base 20: mod_base = um
  modified_base 21: mod_base = OTHER; note = 2'-O-methyladenosine
  source 1..21: mol_type = other RNA
cttccataacattgatgacta

SEQ ID NO: 726 - RNA, 21 nt, synthetic construct
  modified_base 1: mod_base = gm
  modified_base 1^2: mod_base = OTHER; note = phosphorothioate linkage
  modified_base 2: mod_base = cm
  modified_base 3: mod_base = OTHER; note = 2'-O-methyladenosine
  modified_base 4: mod_base = OTHER; note = 2'-O-methyladenosine
  modified_base 5: mod_base = um
  modified_base 6: mod_base = gm
  modified_base 7: mod_base = OTHER; note = 2'-O-methyladenosine
  modified_base 8: mod_base = um
  modified_base 9: mod_base = OTHER; note = 2'-fluoroadenosine
  modified_base 10: mod_base = OTHER; note = 2'-fluoroguanosine
  modified_base 11: mod_base = OTHER; note = 2'-fluorocytidine
  modified_base 12: mod_base = OTHER; note = 2'-O-methyladenosine
  modified_base 13: mod_base = cm
  modified_base 14: mod_base = cm
  modified_base 15: mod_base = um
  modified_base 16: mod_base = OTHER; note = 2'-O-methyladenosine
  modified_base 17: mod_base = OTHER; note = 2'-O-methyladenosine
  modified_base 18: mod_base = OTHER; note = 2'-O-methyladenosine
  modified_base 19: mod_base = cm
  modified_base 20: mod_base = um
  modified_base 21: mod_base = um
  source 1..21: mol_type = other RNA
gcaatgatagcacctaaactt

SEQ ID NO: 727 - RNA, 21 nt, synthetic construct
  modified_base 1: mod_base = OTHER; note = 2'-O-methyl-2-aminoadenosine
  modified_base 1^2: mod_base = OTHER; note = phosphorothioate linkage
  modified_base 2: mod_base = OTHER; note = 2'-O-methyladenosine
  modified_base 3: mod_base = gm
  modified_base 4: mod_base = OTHER; note = 2'-O-methyladenosine
  modified_base 5: mod_base = cm
  modified_base 6: mod_base = OTHER; note = 2'-O-methyladenosine
  modified_base 7: mod_base = gm
  modified_base 8: mod_base = OTHER; note = 2'-O-methyladenosine
  modified_base 9: mod_base = OTHER; note = 2'-fluorocytidine
  modified_base 10: mod_base = OTHER; note = 2'-fluoroadenosine
  modified_base 11: mod_base = OTHER; note = 2'-fluorouridine
  modified_base 12: mod_base = um
  modified_base 13: mod_base = cm
  modified_base 14: mod_base = cm
  modified_base 15: mod_base = um
  modified_base 16: mod_base = um
  modified_base 17: mod_base = cm
  modified_base 18: mod_base = um
  modified_base 19: mod_base = OTHER; note = 2'-O-methyladenosine
  modified_base 20: mod_base = cm
  modified_base 21: mod_base = OTHER; note = 2'-O-methyladenosine
  source 1..21: mol_type = other RNA
nagacagacattccttctaca

SEQ ID NO: 728 - RNA, 21 nt, synthetic construct
  modified_base 1: mod_base = cm
  modified_base 1^2: mod_base = OTHER; note = phosphorothioate linkage
  modified_base 2: mod_base = OTHER; note = 2'-O-methyl-2-aminoadenosine
  modified_base 3: mod_base = um
  modified_base 4: mod_base = gm
  modified_base 5: mod_base = um
  modified_base 6: mod_base = OTHER; note = 2'-O-methyladenosine
  modified_base 7: mod_base = OTHER; note = 2'-O-methyladenosine
  modified_base 8: mod_base = um
  modified_base 9: mod_base = OTHER; note = 2'-fluoroguanosine
  modified_base 10: mod_base = OTHER; note = 2'-fluoroadenosine
  modified_base 11: mod_base = OTHER; note = 2'-fluorocytidine
  modified_base 12: mod_base = OTHER; note = 2'-O-methyladenosine
  modified_base 13: mod_base = cm
  modified_base 14: mod_base = um
  modified_base 15: mod_base = um
  modified_base 16: mod_base = cm
  modified_base 17: mod_base = um
  modified_base 18: mod_base = um
  modified_base 19: mod_base = gm
  modified_base 20: mod_base = um
  modified_base 21: mod_base = OTHER; note = 2'-O-methyladenosine
  source 1..21: mol_type = other RNA
cntgtaatgacacttcttgta

SEQ ID NO: 729 - RNA, 21 nt, synthetic construct
  modified_base 1: mod_base = OTHER; note = 2'-O-methyl-2-aminoadenosine
  modified_base 1^2: mod_base = OTHER; note = phosphorothioate linkage
  modified_base 2: mod_base = um
  modified_base 3: mod_base = OTHER; note = 2'-O-methyladenosine
  modified_base 4: mod_base = cm
  modified_base 5: mod_base = OTHER; note = 2'-O-methyladenosine
  modified_base 6: mod_base = OTHER; note = 2'-O-methyladenosine
  modified_base 7: mod_base = gm
  modified_base 8: mod_base = um
  modified_base 9: mod_base = OTHER; note = 2'-fluoroadenosine
  modified_base 10: mod_base = OTHER; note = 2'-fluoroguanosine
  modified_base 11: mod_base = OTHER; note = 2'-fluoroadenosine
  modified_base 12: mod_base = um
  modified_base 13: mod_base = cm
  modified_base 14: mod_base = cm
  modified_base 15: mod_base = um
  modified_base 16: mod_base = gm
  modified_base 17: mod_base = OTHER; note = 2'-O-methyladenosine
  modified_base 18: mod_base = gm
  modified_base 19: mod_base = OTHER; note = 2'-O-methyladenosine
  modified_base 20: mod_base = OTHER; note = 2'-O-methyladenosine
  modified_base 21: mod_base = OTHER; note = 2'-O-methyladenosine
  source 1..21: mol_type = other RNA
ntacaagtagatcctgagaaa

SEQ ID NO: 730 - RNA, 21 nt, synthetic construct
  modified_base 1: mod_base = OTHER; note = 2'-O-methyladenosine
  modified_base 1^2: mod_base = OTHER; note = phosphorothioate linkage
  modified_base 2: mod_base = gm
  modified_base 3: mod_base = um
  modified_base 4: mod_base = cm
  modified_base 5: mod_base = OTHER; note = 2'-O-methyladenosine
  modified_base 6: mod_base = cm
  modified_base 7: mod_base = OTHER; note = 2'-O-methyladenosine
  modified_base 8: mod_base = OTHER; note = 2'-O-methyladenosine
  modified_base 9: mod_base = OTHER; note = 2'-fluorocytidine
  modified_base 10: mod_base = OTHER; note = 2'-fluorocytidine
  modified_base 11: mod_base = OTHER; note = 2'-fluoroadenosine
  modified_base 12: mod_base = OTHER; note = 2'-O-methyladenosine
  modified_base 13: mod_base = um
  modified_base 14: mod_base = OTHER; note = 2'-O-methyladenosine
  modified_base 15: mod_base = OTHER; note = 2'-O-methyladenosine
  modified_base 16: mod_base = OTHER; note = 2'-O-methyladenosine
  modified_base 17: mod_base = um
  modified_base 18: mod_base = gm
  modified_base 19: mod_base = um
  modified_base 20: mod_base = cm
  modified_base 21: mod_base = um
  source 1..21: mol_type = other RNA
agtcacaaccaataaatgtct

SEQ ID NO: 731 - RNA, 21 nt, synthetic construct
  modified_base 1: mod_base = OTHER; note = 2'-O-methyladenosine
  modified_base 1^2: mod_base = OTHER; note = phosphorothioate linkage
  modified_base 2: mod_base = gm
  modified_base 3: mod_base = um
  modified_base 4: mod_base = cm
  modified_base 5: mod_base = OTHER; note = 2'-O-methyladenosine
  modified_base 6: mod_base = cm
  modified_base 7: mod_base = OTHER; note = 2'-O-methyladenosine
  modified_base 8: mod_base = OTHER; note = 2'-O-methyladenosine
  modified_base 9: mod_base = OTHER; note = 2'-fluorocytidine
  modified_base 10: mod_base = OTHER; note = 2'-fluorocytidine
  modified_base 11: mod_base = OTHER; note = 2'-fluoroadenosine
  modified_base 12: mod_base = OTHER; note = 2'-O-methyladenosine
  modified_base 13: mod_base = um
  modified_base 14: mod_base = OTHER; note = 2'-O-methyladenosine
  modified_base 15: mod_base = OTHER; note = 2'-O-methyladenosine
  modified_base 16: mod_base = OTHER; note = 2'-O-methyladenosine
  modified_base 17: mod_base = um
  modified_base 18: mod_base = gm
  modified_base 19: mod_base = um
  modified_base 20: mod_base = cm
  modified_base 21: mod_base = um
  source 1..21: mol_type = other RNA
agtcacaaccaataaatgtct

SEQ ID NO: 732 - RNA, 21 nt, synthetic construct
  modified_base 1: mod_base = gm
  modified_base 2: mod_base = gm
  modified_base 3: mod_base = OTHER; note = 2'-O-methyladenosine
  modified_base 4: mod_base = OTHER; note = 2'-O-methyladenosine
  modified_base 5: mod_base = OTHER; note = 2'-O-methyladenosine
  modified_base 6: mod_base = cm
  modified_base 7: mod_base = um
  modified_base 8: mod_base = cm
  modified_base 9: mod_base = OTHER; note = 2'-fluoroadenosine
  modified_base 10: mod_base = OTHER; note = 2'-fluoroguanosine
  modified_base 11: mod_base = OTHER; note = 2'-fluoroadenosine
  modified_base 12: mod_base = um
  modified_base 13: mod_base = OTHER; note = 2'-O-methyladenosine
  modified_base 14: mod_base = OTHER; note = 2'-O-methyladenosine
  modified_base 15: mod_base = OTHER; note = 2'-O-methyladenosine
  modified_base 16: mod_base = um
  modified_base 17: mod_base = gm
  modified_base 18: mod_base = cm
  modified_base 19: mod_base = um
  modified_base 20: mod_base = OTHER; note = 2'-O-methyladenosine
  modified_base 21: mod_base = OTHER; note = 2'-O-methyladenosine
  source 1..21: mol_type = other RNA
ggaaactcagataaatgctaa

SEQ ID NO: 733 - RNA, 21 nt, synthetic construct
  modified_base 1: mod_base = OTHER; note = 2'-O-methyladenosine
  modified_base 2: mod_base = gm
  modified_base 3: mod_base = um
  modified_base 4: mod_base = cm
  modified_base 5: mod_base = OTHER; note = 2'-O-methyladenosine
  modified_base 6: mod_base = cm
  modified_base 7: mod_base = OTHER; note = 2'-O-methyladenosine
  modified_base 8: mod_base = OTHER; note = 2'-O-methyladenosine
  modified_base 9: mod_base = OTHER; note = 2'-fluorocytidine
  modified_base 10: mod_base = OTHER; note = 2'-fluorocytidine
  modified_base 11: mod_base = OTHER; note = 2'-fluoroadenosine
  modified_base 12: mod_base = OTHER; note = 2'-O-methyladenosine
  modified_base 13: mod_base = um
  modified_base 14: mod_base = OTHER; note = 2'-O-methyladenosine
  modified_base 15: mod_base = OTHER; note = 2'-O-methyladenosine
  modified_base 16: mod_base = OTHER; note = 2'-O-methyladenosine
  modified_base 17: mod_base = um
  modified_base 18: mod_base = gm
  modified_base 19: mod_base = um
  modified_base 20: mod_base = cm
  modified_base 21: mod_base = um
  source 1..21: mol_type = other RNA
agtcacaaccaataaatgtct

SEQ ID NO: 734 - RNA, 21 nt, synthetic construct
  modified_base 1: mod_base = OTHER; note = 2'-O-methyl-2-aminoadenosine
  modified_base 1^2: mod_base = OTHER; note = phosphorothioate linkage
  modified_base 2: mod_base = OTHER; note = 2'-O-methyladenosine
  modified_base 3: mod_base = gm
  modified_base 4: mod_base = um
  modified_base 5: mod_base = cm
  modified_base 6: mod_base = OTHER; note = 2'-O-methyladenosine
  modified_base 7: mod_base = cm
  modified_base 8: mod_base = OTHER; note = 2'-O-methyladenosine
  modified_base 9: mod_base = OTHER; note = 2'-fluoroadenosine
  modified_base 10: mod_base = OTHER; note = 2'-fluorocytidine
  modified_base 11: mod_base = OTHER; note = 2'-fluorocytidine
  modified_base 12: mod_base = OTHER; note = 2'-O-methyladenosine
  modified_base 13: mod_base = OTHER; note = 2'-O-methyladenosine
  modified_base 14: mod_base = um
  modified_base 15: mod_base = OTHER; note = 2'-O-methyladenosine
  modified_base 16: mod_base = OTHER; note = 2'-O-methyladenosine
  modified_base 17: mod_base = OTHER; note = 2'-O-methyladenosine
  modified_base 18: mod_base = um
  modified_base 19: mod_base = gm
  modified_base 20: mod_base = um
  modified_base 21: mod_base = OTHER; note = 2'-O-methyladenosine
  source 1..21: mol_type = other RNA
nagtcacaaccaataaatgta

SEQ ID NO: 735 - RNA, 21 nt, synthetic construct
  modified_base 1: mod_base = OTHER; note = 2'-O-methyladenosine
  modified_base 1^2: mod_base = OTHER; note = phosphorothioate linkage
  modified_base 2: mod_base = gm
  modified_base 3: mod_base = um
  modified_base 4: mod_base = cm
  modified_base 5: mod_base = OTHER; note = 2'-O-methyladenosine
  modified_base 6: mod_base = cm
  modified_base 7: mod_base = OTHER; note = 2'-O-methyladenosine
  modified_base 8: mod_base = OTHER; note = 2'-O-methyladenosine
  modified_base 9: mod_base = OTHER; note = 2'-fluorocytidine
  modified_base 10: mod_base = OTHER; note = 2'-fluorocytidine
  modified_base 11: mod_base = OTHER; note = 2'-fluoroadenosine
  modified_base 12: mod_base = OTHER; note = 2'-O-methyladenosine
  modified_base 13: mod_base = um
  modified_base 14: mod_base = OTHER; note = 2'-O-methyladenosine
  modified_base 15: mod_base = OTHER; note = 2'-O-methyladenosine
  modified_base 16: mod_base = OTHER; note = 2'-O-methyladenosine
  modified_base 17: mod_base = um
  modified_base 18: mod_base = gm
  modified_base 19: mod_base = um
  modified_base 20: mod_base = cm
  modified_base 21: mod_base = um
  source 1..21: mol_type = other RNA
agtcacaaccaataaatgtct

SEQ ID NO: 736 - RNA, 21 nt, synthetic construct
  modified_base 1: mod_base = gm
  modified_base 1^2: mod_base = OTHER; note = phosphorothioate linkage
  modified_base 2: mod_base = gm
  modified_base 3: mod_base = OTHER; note = 2'-O-methyladenosine
  modified_base 4: mod_base = OTHER; note = 2'-O-methyladenosine
  modified_base 5: mod_base = OTHER; note = 2'-O-methyladenosine
  modified_base 6: mod_base = cm
  modified_base 7: mod_base = um
  modified_base 8: mod_base = cm
  modified_base 9: mod_base = OTHER; note = 2'-fluoroadenosine
  modified_base 10: mod_base = gm
  modified_base 11: mod_base = OTHER; note = 2'-fluoroadenosine
  modified_base 12: mod_base = um
  modified_base 13: mod_base = OTHER; note = 2'-fluoroadenosine
  modified_base 14: mod_base = OTHER; note = 2'-O-methyladenosine
  modified_base 15: mod_base = OTHER; note = 2'-O-methyladenosine
  modified_base 16: mod_base = um
  modified_base 17: mod_base = gm
  modified_base 18: mod_base = cm
  modified_base 19: mod_base = um
  modified_base 20: mod_base = OTHER; note = 2'-O-methyladenosine
  modified_base 21: mod_base = OTHER; note = 2'-O-methyladenosine
  source 1..21: mol_type = other RNA
ggaaactcagataaatgctaa

SEQ ID NO: 737 - RNA, 21 nt, synthetic construct
  modified_base 1: mod_base = gm
  modified_base 1^2: mod_base = OTHER; note = phosphorothioate linkage
  modified_base 2: mod_base = gm
  modified_base 3: mod_base = um
  modified_base 4: mod_base = cm
  modified_base 5: mod_base = OTHER; note = 2'-O-methyladenosine
  modified_base 6: mod_base = cm
  modified_base 7: mod_base = OTHER; note = 2'-O-methyladenosine
  modified_base 8: mod_base = OTHER; note = 2'-O-methyladenosine
  modified_base 9: mod_base = OTHER; note = 2'-fluorocytidine
  modified_base 10: mod_base = OTHER; note = 2'-fluorocytidine
  modified_base 11: mod_base = OTHER; note = 2'-fluoroadenosine
  modified_base 12: mod_base = OTHER; note = 2'-O-methyladenosine
  modified_base 13: mod_base = um
  modified_base 14: mod_base = OTHER; note = 2'-O-methyladenosine
  modified_base 15: mod_base = OTHER; note = 2'-O-methyladenosine
  modified_base 16: mod_base = OTHER; note = 2'-O-methyladenosine
  modified_base 17: mod_base = um
  modified_base 18: mod_base = gm
  modified_base 19: mod_base = um
  modified_base 20: mod_base = cm
  modified_base 21: mod_base = um
  source 1..21: mol_type = other RNA
ggtcacaaccaataaatgtct

SEQ ID NO: 738 - RNA, 21 nt, synthetic construct
  modified_base 1: mod_base = gm
  modified_base 1^2: mod_base = OTHER; note = phosphorothioate linkage
  modified_base 2: mod_base = gm
  modified_base 3: mod_base = um
  modified_base 4: mod_base = cm
  modified_base 5: mod_base = OTHER; note = 2'-O-methyladenosine
  modified_base 6: mod_base = cm
  modified_base 7: mod_base = OTHER; note = 2'-O-methyladenosine
  modified_base 8: mod_base = OTHER; note = 2'-O-methyladenosine
  modified_base 9: mod_base = OTHER; note = 2'-fluorocytidine
  modified_base 10: mod_base = OTHER; note = 2'-fluorocytidine
  modified_base 11: mod_base = OTHER; note = 2'-fluoroadenosine
  modified_base 12: mod_base = OTHER; note = 2'-O-methyladenosine
  modified_base 13: mod_base = um
  modified_base 14: mod_base = OTHER; note = 2'-O-methyladenosine
  modified_base 15: mod_base = OTHER; note = 2'-O-methyladenosine
  modified_base 16: mod_base = OTHER; note = 2'-O-methyladenosine
  modified_base 17: mod_base = um
  modified_base 18: mod_base = gm
  modified_base 19: mod_base = um
  modified_base 20: mod_base = cm
  modified_base 21: mod_base = OTHER; note = 2'-O-methyladenosine
  source 1..21: mol_type = other RNA
ggtcacaaccaataaatgtca

SEQ ID NO: 739 - RNA, 21 nt, synthetic construct
  modified_base 1: mod_base = OTHER; note = 2'-O-methyladenosine
  modified_base 1^2: mod_base = OTHER; note = phosphorothioate linkage
  modified_base 2: mod_base = gm
  modified_base 3: mod_base = um
  modified_base 4: mod_base = cm
  modified_base 5: mod_base = OTHER; note = 2'-O-methyladenosine
  modified_base 6: mod_base = cm
  modified_base 7: mod_base = OTHER; note = 2'-O-methyladenosine
  modified_base 8: mod_base = OTHER; note = 2'-O-methyladenosine
  modified_base 9: mod_base = OTHER; note = 2'-fluorocytidine
  modified_base 10: mod_base = OTHER; note = 2'-fluorocytidine
  modified_base 11: mod_base = OTHER; note = 2'-fluoroadenosine
  modified_base 12: mod_base = OTHER; note = 2'-O-methyladenosine
  modified_base 13: mod_base = um
  modified_base 14: mod_base = OTHER; note = 2'-O-methyladenosine
  modified_base 15: mod_base = OTHER; note = 2'-O-methyladenosine
  modified_base 16: mod_base = OTHER; note = 2'-O-methyladenosine
  modified_base 17: mod_base = um
  modified_base 18: mod_base = gm
  modified_base 19: mod_base = um
  modified_base 20: mod_base = cm
  modified_base 21: mod_base = OTHER; note = 2'-O-methyladenosine
  source 1..21: mol_type = other RNA
agtcacaaccaataaatgtca

SEQ ID NO: 740 - RNA, 21 nt, synthetic construct
  modified_base 1: mod_base = cm
  modified_base 1^2: mod_base = OTHER; note = phosphorothioate linkage
  modified_base 2: mod_base = OTHER; note = 2'-O-methyl-2-aminoadenosine
  modified_base 3: mod_base = um
  modified_base 4: mod_base = um
  modified_base 5: mod_base = gm
  modified_base 6: mod_base = cm
  modified_base 7: mod_base = cm
  modified_base 8: mod_base = um
  modified_base 9: mod_base = OTHER; note = 2'-fluorouridine
  modified_base 10: mod_base = OTHER; note = 2'-fluoroadenosine
  modified_base 11: mod_base = OTHER; note = 2'-fluorocytidine
  modified_base 12: mod_base = um
  modified_base 13: mod_base = gm
  modified_base 14: mod_base = OTHER; note = 2'-O-methyladenosine
  modified_base 15: mod_base = OTHER; note = 2'-O-methyladenosine
  modified_base 16: mod_base = OTHER; note = 2'-O-methyladenosine
  modified_base 17: mod_base = um
  modified_base 18: mod_base = cm
  modified_base 19: mod_base = cm
  modified_base 20: mod_base = OTHER; note = 2'-O-methyladenosine
  modified_base 21: mod_base = OTHER; note = 2'-O-methyladenosine
  source 1..21: mol_type = other RNA
cnttgccttactgaaatccaa

SEQ ID NO: 741 - RNA, 21 nt, synthetic construct
  modified_base 1: mod_base = gm
  modified_base 1^2: mod_base = OTHER; note = phosphorothioate linkage
  modified_base 2: mod_base = OTHER; note = 2'-O-methyl-2-aminoadenosine
  modified_base 3: mod_base = OTHER; note = 2'-O-methyladenosine
  modified_base 4: mod_base = OTHER; note = 2'-O-methyladenosine
  modified_base 5: mod_base = um
  modified_base 6: mod_base = cm
  modified_base 7: mod_base = cm
  modified_base 8: mod_base = OTHER; note = 2'-O-methyladenosine
  modified_base 9: mod_base = OTHER; note = 2'-fluoroguanosine
  modified_base 10: mod_base = OTHER; note = 2'-fluoroadenosine
  modified_base 11: mod_base = OTHER; note = 2'-fluoroguanosine
  modified_base 12: mod_base = cm
  modified_base 13: mod_base = cm
  modified_base 14: mod_base = um
  modified_base 15: mod_base = OTHER; note = 2'-O-methyladenosine
  modified_base 16: mod_base = OTHER; note = 2'-O-methyladenosine
  modified_base 17: mod_base = cm
  modified_base 18: mod_base = cm
  modified_base 19: mod_base = um
  modified_base 20: mod_base = um
  modified_base 21: mod_base = OTHER; note = 2'-O-methyladenosine
  source 1..21: mol_type = other RNA
gnaatccagagcctaacctta

SEQ ID NO: 742 - RNA, 21 nt, synthetic construct
  modified_base 1: mod_base = gm
  modified_base 1^2: mod_base = OTHER; note = phosphorothioate linkage
  modified_base 2: mod_base = OTHER; note = 2'-O-methyladenosine
  modified_base 3: mod_base = um
  modified_base 4: mod_base = um
  modified_base 5: mod_base = cm
  modified_base 6: mod_base = gm
  modified_base 7: mod_base = gm
  modified_base 8: mod_base = OTHER; note = 2'-O-methyladenosine
  modified_base 9: mod_base = OTHER; note = 2'-fluoroadenosine
  modified_base 10: mod_base = OTHER; note = 2'-fluoroadenosine
  modified_base 11: mod_base = OTHER; note = 2'-fluorocytidine
  modified_base 12: mod_base = um
  modified_base 13: mod_base = cm
  modified_base 14: mod_base = OTHER; note = 2'-O-methyladenosine
  modified_base 15: mod_base = gm
  modified_base 16: mod_base = OTHER; note = 2'-O-methyladenosine
  modified_base 17: mod_base = um
  modified_base 18: mod_base = OTHER; note = 2'-O-methyladenosine
  modified_base 19: mod_base = OTHER; note = 2'-O-methyladenosine
  modified_base 20: mod_base = OTHER; note = 2'-O-methyl-2-aminoadenosine
  modified_base 21: mod_base = um
  source 1..21: mol_type = other RNA
gattcggaaactcagataant

SEQ ID NO: 743 - RNA, 21 nt, synthetic construct
  modified_base 1: mod_base = OTHER; note = 2'-O-methyl-2-aminoadenosine
  modified_base 1^2: mod_base = OTHER; note = phosphorothioate linkage
  modified_base 2: mod_base = OTHER; note = 2'-O-methyladenosine
  modified_base 3: mod_base = gm
  modified_base 4: mod_base = um
  modified_base 5: mod_base = cm
  modified_base 6: mod_base = OTHER; note = 2'-O-methyladenosine
  modified_base 7: mod_base = cm
  modified_base 8: mod_base = OTHER; note = 2'-O-methyladenosine
  modified_base 9: mod_base = OTHER; note = 2'-fluoroadenosine
  modified_base 10: mod_base = OTHER; note = 2'-fluorocytidine
  modified_base 11: mod_base = OTHER; note = 2'-fluorocytidine
  modified_base 12: mod_base = OTHER; note = 2'-O-methyladenosine
  modified_base 13: mod_base = OTHER; note = 2'-O-methyladenosine
  modified_base 14: mod_base = um
  modified_base 15: mod_base = OTHER; note = 2'-O-methyladenosine
  modified_base 16: mod_base = OTHER; note = 2'-O-methyladenosine
  modified_base 17: mod_base = OTHER; note = 2'-O-methyladenosine
  modified_base 18: mod_base = um
  modified_base 19: mod_base = gm
  modified_base 20: mod_base = um
  modified_base 21: mod_base = OTHER; note = 2'-O-methyladenosine
  source 1..21: mol_type = other RNA
nagtcacaaccaataaatgta

SEQ ID NO: 744 - RNA, 21 nt, synthetic construct
  modified_base 1: mod_base = OTHER; note = 2'-O-methyladenosine
  modified_base 1^2: mod_base = OTHER; note = phosphorothioate linkage
  modified_base 2: mod_base = gm
  modified_base 3: mod_base = um
  modified_base 4: mod_base = cm
  modified_base 5: mod_base = OTHER; note = 2'-O-methyladenosine
  modified_base 6: mod_base = cm
  modified_base 7: mod_base = OTHER; note = 2'-O-methyladenosine
  modified_base 8: mod_base = OTHER; note = 2'-O-methyladenosine
  modified_base 9: mod_base = OTHER; note = 2'-fluorocytidine
  modified_base 10: mod_base = OTHER; note = 2'-fluorocytidine
  modified_base 11: mod_base = OTHER; note = 2'-fluoroadenosine
  modified_base 12: mod_base = OTHER; note = 2'-O-methyladenosine
  modified_base 13: mod_base = um
  modified_base 14: mod_base = OTHER; note = 2'-O-methyladenosine
  modified_base 15: mod_base = OTHER; note = 2'-O-methyladenosine
  modified_base 16: mod_base = OTHER; note = 2'-O-methyladenosine
  modified_base 17: mod_base = um
  modified_base 18: mod_base = gm
  modified_base 19: mod_base = um
  modified_base 20: mod_base = cm
  modified_base 21: mod_base = um
  source 1..21: mol_type = other RNA
agtcacaaccaataaatgtct

SEQ ID NO: 745 - RNA, 21 nt, synthetic construct
  modified_base 1: mod_base = gm
  modified_base 1^2: mod_base = OTHER; note = phosphorothioate linkage
  modified_base 2: mod_base = OTHER; note = 2'-O-methyladenosine
  modified_base 3: mod_base = OTHER; note = 2'-O-methyladenosine
  modified_base 4: mod_base = OTHER; note = 2'-O-methyladenosine
  modified_base 5: mod_base = gm
  modified_base 6: mod_base = um
  modified_base 7: mod_base = cm
  modified_base 8: mod_base = OTHER; note = 2'-O-methyladenosine
  modified_base 9: mod_base = OTHER; note = 2'-fluorocytidine
  modified_base 10: mod_base = OTHER; note = 2'-fluoroadenosine
  modified_base 11: mod_base = OTHER; note = 2'-fluoroadenosine
  modified_base 12: mod_base = cm
  modified_base 13: mod_base = cm
  modified_base 14: mod_base = OTHER; note = 2'-O-methyladenosine
  modified_base 15: mod_base = OTHER; note = 2'-O-methyladenosine
  modified_base 16: mod_base = um
  modified_base 17: mod_base = OTHER; note = 2'-O-methyladenosine
  modified_base 18: mod_base = OTHER; note = 2'-O-methyladenosine
  modified_base 19: mod_base = OTHER; note = 2'-O-methyl-2-aminoadenosine
  modified_base 20: mod_base = um
  modified_base 21: mod_base = OTHER; note = 2'-O-methyladenosine
  source 1..21: mol_type = other RNA
gaaagtcacaaccaataanta

SEQ ID NO: 746 - RNA, 21 nt, synthetic construct
  modified_base 1: mod_base = gm
  modified_base 1^2: mod_base = OTHER; note = phosphorothioate linkage
  modified_base 2: mod_base = gm
  modified_base 3: mod_base = OTHER; note = 2'-O-methyladenosine
  modified_base 4: mod_base = OTHER; note = 2'-O-methyladenosine
  modified_base 5: mod_base = OTHER; note = 2'-O-methyladenosine
  modified_base 6: mod_base = cm
  modified_base 7: mod_base = um
  modified_base 8: mod_base = cm
  modified_base 9: mod_base = OTHER; note = 2'-fluoroadenosine
  modified_base 10: mod_base = OTHER; note = 2'-fluoroguanosine
  modified_base 11: mod_base = OTHER; note = 2'-fluoroadenosine
  modified_base 12: mod_base = um
  modified_base 13: mod_base = OTHER; note = 2'-O-methyladenosine
  modified_base 14: mod_base = OTHER; note = 2'-O-methyladenosine
  modified_base 15: mod_base = OTHER; note = 2'-O-methyladenosine
  modified_base 16: mod_base = um
  modified_base 17: mod_base = gm
  modified_base 18: mod_base = cm
  modified_base 19: mod_base = um
  modified_base 20: mod_base = OTHER; note = 2'-O-methyladenosine
  modified_base 21: mod_base = OTHER; note = 2'-O-methyladenosine
  source 1..21: mol_type = other RNA
ggaaactcagataaatgctaa

SEQ ID NO: 747 - RNA, 21 nt, synthetic construct
  modified_base 1: mod_base = OTHER; note = 2'-O-methyladenosine
  modified_base 1^2: mod_base = OTHER; note = phosphorothioate linkage
  modified_base 2: mod_base = um
  modified_base 3: mod_base = cm
  modified_base 4: mod_base = cm
  modified_base 5: mod_base = OTHER; note = 2'-O-methyladenosine
  modified_base 6: mod_base = gm
  modified_base 7: mod_base = OTHER; note = 2'-O-methyladenosine
  modified_base 8: mod_base = gm
  modified_base 9: mod_base = OTHER; note = 2'-fluorocytidine
  modified_base 10: mod_base = OTHER; note = 2'-fluorocytidine
  modified_base 11: mod_base = OTHER; note = 2'-fluorouridine
  modified_base 12: mod_base = OTHER; note = 2'-O-methyladenosine
  modified_base 13: mod_base = OTHER; note = 2'-O-methyladenosine
  modified_base 14: mod_base = cm
  modified_base 15: mod_base = cm
  modified_base 16: mod_base = um
  modified_base 17: mod_base = um
  modified_base 18: mod_base = cm
  modified_base 19: mod_base = OTHER; note = 2'-O-methyladenosine
  modified_base 20: mod_base = OTHER; note = 2'-O-methyladenosine
  modified_base 21: mod_base = um
  source 1..21: mol_type = other RNA
atccagagcctaaccttcaat

SEQ ID NO: 748 - RNA, 21 nt, synthetic construct
  modified_base 1: mod_base = um
  modified_base 1^2: mod_base = OTHER; note = phosphorothioate linkage
  modified_base 2: mod_base = OTHER; note = 2'-O-methyl-2-aminoadenosine
  modified_base 3: mod_base = cm
  modified_base 4: mod_base = um
  modified_base 5: mod_base = gm
  modified_base 6: mod_base = OTHER; note = 2'-O-methyladenosine
  modified_base 7: mod_base = OTHER; note = 2'-O-methyladenosine
  modified_base 8: mod_base = OTHER; note = 2'-O-methyladenosine
  modified_base 9: mod_base = OTHER; note = 2'-fluorouridine
  modified_base 10: mod_base = OTHER; note = 2'-fluorocytidine
  modified_base 11: mod_base = OTHER; note = 2'-fluorocytidine
  modified_base 12: mod_base = OTHER; note = 2'-O-methyladenosine
  modified_base 13: mod_base = gm
  modified_base 14: mod_base = OTHER; note = 2'-O-methyladenosine
  modified_base 15: mod_base = gm
  modified_base 16: mod_base = cm
  modified_base 17: mod_base = cm
  modified_base 18: mod_base = um
  modified_base 19: mod_base = OTHER; note = 2'-O-methyladenosine
  modified_base 20: mod_base = OTHER; note = 2'-O-methyladenosine
  modified_base 21: mod_base = OTHER; note = 2'-O-methyladenosine
  source 1..21: mol_type = other RNA
tnctgaaatccagagcctaaa

SEQ ID NO: 749 - RNA, 21 nt, synthetic construct
  modified_base 1: mod_base = gm
  modified_base 1^2: mod_base = OTHER; note = phosphorothioate linkage
  modified_base 2: mod_base = gm
  modified_base 3: mod_base = OTHER; note = 2'-O-methyladenosine
  modified_base 4: mod_base = OTHER; note = 2'-O-methyladenosine
  modified_base 5: mod_base = OTHER; note = 2'-O-methyladenosine
  modified_base 6: mod_base = cm
  modified_base 7: mod_base = um
  modified_base 8: mod_base = cm
  modified_base 9: mod_base = OTHER; note = 2'-fluoroadenosine
  modified_base 10: mod_base = gm
  modified_base 11: mod_base = OTHER; note = 2'-fluoroadenosine
  modified_base 12: mod_base = um
  modified_base 13: mod_base = OTHER; note = 2'-fluoroadenosine
  modified_base 14: mod_base = OTHER; note = 2'-O-methyladenosine
  modified_base 15: mod_base = OTHER; note = 2'-O-methyladenosine
  modified_base 16: mod_base = um
  modified_base 17: mod_base = gm
  modified_base 18: mod_base = cm
  modified_base 19: mod_base = um
  modified_base 20: mod_base = OTHER; note = 2'-O-methyladenosine
  modified_base 21: mod_base = OTHER; note = 2'-O-methyladenosine
  source 1..21: mol_type = other RNA
ggaaactcagataaatgctaa

SEQ ID NO: 750 - RNA, 21 nt, synthetic construct
  modified_base 1: mod_base = OTHER; note = 2'-O-methyladenosine
  modified_base 1^2: mod_base = OTHER; note = phosphorothioate linkage
  modified_base 2: mod_base = gm
  modified_base 3: mod_base = um
  modified_base 4: mod_base = cm
  modified_base 5: mod_base = OTHER; note = 2'-O-methyladenosine
  modified_base 6: mod_base = cm
  modified_base 7: mod_base = OTHER; note = 2'-O-methyladenosine
  modified_base 8: mod_base = OTHER; note = 2'-O-methyladenosine
  modified_base 9: mod_base = OTHER; note = 2'-fluorocytidine
  modified_base 10: mod_base = cm
  modified_base 11: mod_base = OTHER; note = 2'-fluoroadenosine
  modified_base 12: mod_base = OTHER; note = 2'-O-methyladenosine
  modified_base 13: mod_base = OTHER; note = 2'-fluorouridine
  modified_base 14: mod_base = OTHER; note = 2'-O-methyladenosine
  modified_base 15: mod_base = OTHER; note = 2'-O-methyladenosine
  modified_base 16: mod_base = OTHER; note = 2'-O-methyladenosine
  modified_base 17: mod_base = um
  modified_base 18: mod_base = gm
  modified_base 19: mod_base = um
  modified_base 20: mod_base = cm
  modified_base 21: mod_base = um
  source 1..21: mol_type = other RNA
agtcacaaccaataaatgtct

SEQ ID NO: 751 - RNA, 21 nt, synthetic construct
  modified_base 1: mod_base = OTHER; note = 2'-O-methyladenosine
  modified_base 1^2: mod_base = OTHER; note = phosphorothioate linkage
  modified_base 2: mod_base = gm
  modified_base 3: mod_base = OTHER; note = 2'-O-methyladenosine
  modified_base 4: mod_base = gm
  modified_base 5: mod_base = cm
  modified_base 6: mod_base = cm
  modified_base 7: mod_base = um
  modified_base 8: mod_base = OTHER; note = 2'-O-methyladenosine
  modified_base 9: mod_base = OTHER; note = 2'-fluoroadenosine
  modified_base 10: mod_base = OTHER; note = 2'-fluorocytidine
  modified_base 11: mod_base = OTHER; note = 2'-fluorocytidine
  modified_base 12: mod_base = um
  modified_base 13: mod_base = um
  modified_base 14: mod_base = cm
  modified_base 15: mod_base = OTHER; note = 2'-O-methyladenosine
  modified_base 16: mod_base = OTHER; note = 2'-O-methyladenosine
  modified_base 17: mod_base = um
  modified_base 18: mod_base = cm
  modified_base 19: mod_base = um
  modified_base 20: mod_base = cm
  modified_base 21: mod_base = OTHER; note = 2'-O-methyladenosine
  source 1..21: mol_type = other RNA
agagcctaaccttcaatctca

SEQ ID NO: 752 - RNA, 21 nt, synthetic construct
  modified_base 1: mod_base = OTHER; note = 2'-O-methyladenosine
  modified_base 1^2: mod_base = OTHER; note = phosphorothioate linkage
  modified_base 2: mod_base = gm
  modified_base 3: mod_base = OTHER; note = 2'-O-methyladenosine
  modified_base 4: mod_base = gm
  modified_base 5: mod_base = cm
  modified_base 6: mod_base = cm
  modified_base 7: mod_base = um
  modified_base 8: mod_base = OTHER; note = 2'-O-methyladenosine
  modified_base 9: mod_base = OTHER; note = 2'-fluoroadenosine
  modified_base 10: mod_base = OTHER; note = 2'-fluorocytidine
  modified_base 11: mod_base = OTHER; note = 2'-fluorocytidine
  modified_base 12: mod_base = um
  modified_base 13: mod_base = um
  modified_base 14: mod_base = cm
  modified_base 15: mod_base = OTHER; note = 2'-O-methyladenosine
  modified_base 16: mod_base = OTHER; note = 2'-O-methyladenosine
  modified_base 17: mod_base = um
  modified_base 18: mod_base = cm
  modified_base 19: mod_base = cm
  modified_base 20: mod_base = cm
  modified_base 21: mod_base = OTHER; note = 2'-O-methyladenosine
  source 1..21: mol_type = other RNA
agagcctaaccttcaatccca

SEQ ID NO: 753 - RNA, 21 nt, synthetic construct
  modified_base 1: mod_base = gm
  modified_base 1^2: mod_base = OTHER; note = phosphorothioate linkage
  modified_base 2: mod_base = gm
  modified_base 3: mod_base = OTHER; note = 2'-O-methyladenosine
  modified_base 4: mod_base = OTHER; note = 2'-O-methyladenosine
  modified_base 5: mod_base = OTHER; note = 2'-O-methyladenosine
  modified_base 6: mod_base = cm
  modified_base 7: mod_base = um
  modified_base 8: mod_base = cm
  modified_base 9: mod_base = OTHER; note = adenosine
  modified_base 10: mod_base = gm
  modified_base 11: mod_base = OTHER; note = adenosine
  modified_base 12: mod_base = um
  modified_base 13: mod_base = OTHER; note = adenosine
  modified_base 14: mod_base = OTHER; note = 2'-O-methyladenosine
  modified_base 15: mod_base = OTHER; note = 2'-O-methyladenosine
  modified_base 16: mod_base = um
  modified_base 17: mod_base = gm
  modified_base 18: mod_base = cm
  modified_base 19: mod_base = um
  modified_base 20: mod_base = OTHER; note = 2'-O-methyladenosine
  modified_base 21: mod_base = OTHER; note = 2'-O-methyladenosine
  source 1..21: mol_type = other RNA
ggaaactcagataaatgctaa

SEQ ID NO: 754 - RNA, 19 nt, synthetic construct
  modified_base 1: mod_base = gm
  modified_base 1^2: mod_base = OTHER; note = phosphorothioate linkage
  modified_base 2: mod_base = OTHER; note = 2'-O-methyl-2-aminoadenosine
  modified_base 3: mod_base = OTHER; note = 2'-O-methyladenosine
  modified_base 4: mod_base = cm
  modified_base 5: mod_base = um
  modified_base 6: mod_base = cm
  modified_base 7: mod_base = OTHER; note = 2'-fluoroadenosine
  modified_base 8: mod_base = OTHER; note = 2'-fluoroguanosine
  modified_base 9: mod_base = OTHER; note = 2'-fluoroadenosine
  modified_base 10: mod_base = um
  modified_base 11: mod_base = OTHER; note = 2'-O-methyladenosine
  modified_base 12: mod_base = OTHER; note = 2'-O-methyladenosine
  modified_base 13: mod_base = OTHER; note = 2'-O-methyladenosine
  modified_base 14: mod_base = um
  modified_base 15: mod_base = gm
  modified_base 16: mod_base = cm
  modified_base 17: mod_base = um
  modified_base 18: mod_base = OTHER; note = 2'-O-methyladenosine
  modified_base 19: mod_base = OTHER; note = 2'-O-methyladenosine
  source 1..19: mol_type = other RNA
gnactcagataaatgctaa

SEQ ID NO: 755 - RNA, 21 nt, synthetic construct
  modified_base 1: mod_base = OTHER; note = 2'-O-methyladenosine
  modified_base 1^2: mod_base = OTHER; note = phosphorothioate linkage
  modified_base 2: mod_base = gm
  modified_base 3: mod_base = um
  modified_base 4: mod_base = cm
  modified_base 5: mod_base = OTHER; note = 2'-O-methyladenosine
  modified_base 6: mod_base = cm
  modified_base 7: mod_base = OTHER; note = 2'-fluoroadenosine
  modified_base 8: mod_base = OTHER; note = 2'-O-methyladenosine
  modified_base 9: mod_base = OTHER; note = 2'-fluorocytidine
  modified_base 10: mod_base = cm
  modified_base 11: mod_base = OTHER; note = 2'-fluoroadenosine
  modified_base 12: mod_base = OTHER; note = 2'-O-methyladenosine
  modified_base 13: mod_base = um
  modified_base 14: mod_base = OTHER; note = 2'-O-methyladenosine
  modified_base 15: mod_base = OTHER; note = 2'-O-methyladenosine
  modified_base 16: mod_base = OTHER; note = 2'-O-methyladenosine
  modified_base 17: mod_base = um
  modified_base 18: mod_base = gm
  modified_base 19: mod_base = um
  modified_base 20: mod_base = cm
  modified_base 21: mod_base = um
  source 1..21: mol_type = other RNA
agtcacaaccaataaatgtct

SEQ ID NO: 756 - RNA, 21 nt, synthetic construct
  modified_base 1: mod_base = gm
  modified_base 1^2: mod_base = OTHER; note = phosphorothioate linkage
  modified_base 2: mod_base = gm
  modified_base 3: mod_base = um
  modified_base 4: mod_base = cm
  modified_base 5: mod_base = OTHER; note = 2'-O-methyladenosine
  modified_base 6: mod_base = cm
  modified_base 7: mod_base = OTHER; note = 2'-O-methyladenosine
  modified_base 8: mod_base = OTHER; note = 2'-O-methyladenosine
  modified_base 9: mod_base = OTHER; note = 2'-fluorocytidine
  modified_base 10: mod_base = OTHER; note = 2'-fluorocytidine
  modified_base 11: mod_base = OTHER; note = 2'-fluoroadenosine
  modified_base 12: mod_base = OTHER; note = 2'-O-methyladenosine
  modified_base 13: mod_base = um
  modified_base 14: mod_base = OTHER; note = 2'-O-methyladenosine
  modified_base 15: mod_base = OTHER; note = 2'-O-methyladenosine
  modified_base 16: mod_base = OTHER; note = 2'-O-methyladenosine
  modified_base 17: mod_base = um
  modified_base 18: mod_base = gm
  modified_base 19: mod_base = um
  modified_base 20: mod_base = cm
  modified_base 21: mod_base = um
  source 1..21: mol_type = other RNA
ggtcacaaccaataaatgtct

SEQ ID NO: 757 - RNA, 21 nt, synthetic construct
  modified_base 1: mod_base = gm
  modified_base 1^2: mod_base = OTHER; note = phosphorothioate linkage
  modified_base 2: mod_base = gm
  modified_base 3: mod_base = um
  modified_base 4: mod_base = cm
  modified_base 5: mod_base = OTHER; note = 2'-O-methyladenosine
  modified_base 6: mod_base = cm
  modified_base 7: mod_base = OTHER; note = 2'-O-methyladenosine
  modified_base 8: mod_base = OTHER; note = 2'-O-methyladenosine
  modified_base 9: mod_base = OTHER; note = 2'-fluorocytidine
  modified_base 10: mod_base = OTHER; note = 2'-fluorocytidine
  modified_base 11: mod_base = OTHER; note = 2'-fluoroadenosine
  modified_base 12: mod_base = OTHER; note = 2'-O-methyladenosine
  modified_base 13: mod_base = um
  modified_base 14: mod_base = OTHER; note = 2'-O-methyladenosine
  modified_base 15: mod_base = OTHER; note = 2'-O-methyladenosine
  modified_base 16: mod_base = OTHER; note = 2'-O-methyladenosine
  modified_base 17: mod_base = um
  modified_base 18: mod_base = gm
  modified_base 19: mod_base = um
  modified_base 20: mod_base = cm
  modified_base 21: mod_base = OTHER; note = 2'-O-methyladenosine
  source 1..21: mol_type = other RNA
ggtcacaaccaataaatgtca

SEQ ID NO: 758 - RNA, 21 nt, synthetic construct
  modified_base 1: mod_base = OTHER; note = 2'-O-methyladenosine
  modified_base 1^2: mod_base = OTHER; note = phosphorothioate linkage
  modified_base 2: mod_base = gm
  modified_base 3: mod_base = um
  modified_base 4: mod_base = cm
  modified_base 5: mod_base = OTHER; note = 2'-O-methyladenosine
  modified_base 6: mod_base = cm
  modified_base 7: mod_base = OTHER; note = 2'-O-methyladenosine
  modified_base 8: mod_base = OTHER; note = 2'-O-methyladenosine
  modified_base 9: mod_base = OTHER; note = 2'-fluorocytidine
  modified_base 10: mod_base = OTHER; note = 2'-fluorocytidine
  modified_base 11: mod_base = OTHER; note = 2'-fluoroadenosine
  modified_base 12: mod_base = OTHER; note = 2'-O-methyladenosine
  modified_base 13: mod_base = um
  modified_base 14: mod_base = OTHER; note = 2'-O-methyladenosine
  modified_base 15: mod_base = OTHER; note = 2'-O-methyladenosine
  modified_base 16: mod_base = OTHER; note = 2'-O-methyladenosine
  modified_base 17: mod_base = um
  modified_base 18: mod_base = gm
  modified_base 19: mod_base = um
  modified_base 20: mod_base = cm
  modified_base 21: mod_base = OTHER; note = 2'-O-methyladenosine
  source 1..21: mol_type = other RNA
agtcacaaccaataaatgtca

SEQ ID NO: 759 - RNA, 21 nt, synthetic construct
  modified_base 1: mod_base = OTHER; note = 2'-O-methyl-2-aminoadenosine
  modified_base 1^2: mod_base = OTHER; note = phosphorothioate linkage
  modified_base 2: mod_base = OTHER; note = 2'-O-methyladenosine
  modified_base 3: mod_base = gm
  modified_base 4: mod_base = um
  modified_base 5: mod_base = cm
  modified_base 6: mod_base = OTHER; note = 2'-O-methyladenosine
  modified_base 7: mod_base = cm
  modified_base 8: mod_base = OTHER; note = 2'-O-methyladenosine
  modified_base 9: mod_base = OTHER; note = 2'-fluoroadenosine
  modified_base 10: mod_base = cm
  modified_base 11: mod_base = OTHER; note = 2'-fluorocytidine
  modified_base 12: mod_base = OTHER; note = 2'-O-methyladenosine
  modified_base 13: mod_base = OTHER; note = 2'-fluoroadenosine
  modified_base 14: mod_base = um
  modified_base 15: mod_base = OTHER; note = 2'-O-methyladenosine
  modified_base 16: mod_base = OTHER; note = 2'-O-methyladenosine
  modified_base 17: mod_base = OTHER; note = 2'-O-methyladenosine
  modified_base 18: mod_base = um
  modified_base 19: mod_base = gm
  modified_base 20: mod_base = um
  modified_base 21: mod_base = OTHER; note = 2'-O-methyladenosine
  source 1..21: mol_type = other RNA
nagtcacaaccaataaatgta

SEQ ID NO: 760 - RNA, 21 nt, synthetic construct
  modified_base 1: mod_base = gm
  modified_base 2: mod_base = gm
  modified_base 3: mod_base = um
  modified_base 4: mod_base = cm
  modified_base 5: mod_base = OTHER; note = 2'-O-methyladenosine
  modified_base 6: mod_base = cm
  modified_base 7: mod_base = OTHER; note = 2'-O-methyladenosine
  modified_base 8: mod_base = OTHER; note = 2'-O-methyladenosine
  modified_base 9: mod_base = OTHER; note = 2'-fluorocytidine
  modified_base 10: mod_base = OTHER; note = 2'-fluorocytidine
  modified_base 11: mod_base = OTHER; note = 2'-fluoroadenosine
  modified_base 12: mod_base = OTHER; note = 2'-O-methyladenosine
  modified_base 13: mod_base = um
  modified_base 14: mod_base = OTHER; note = 2'-O-methyladenosine
  modified_base 15: mod_base = OTHER; note = 2'-O-methyladenosine
  modified_base 16: mod_base = OTHER; note = 2'-O-methyladenosine
  modified_base 17: mod_base = um
  modified_base 18: mod_base = gm
  modified_base 19: mod_base = um
  modified_base 20: mod_base = cm
  modified_base 21: mod_base = um
  source 1..21: mol_type = other RNA
ggtcacaaccaataaatgtct

SEQ ID NO: 761 - RNA, 21 nt, synthetic construct
  modified_base 1: mod_base = OTHER; note = 2'-O-methyladenosine
  modified_base 1^2: mod_base = OTHER; note = phosphorothioate linkage
  modified_base 2: mod_base = gm
  modified_base 3: mod_base = um
  modified_base 4: mod_base = cm
  modified_base 5: mod_base = OTHER; note = 2'-O-methyladenosine
  modified_base 6: mod_base = cm
  modified_base 7: mod_base = OTHER; note = 2'-O-methyladenosine
  modified_base 8: mod_base = OTHER; note = 2'-O-methyladenosine
  modified_base 9: mod_base = OTHER; note = 2'-fluorocytidine
  modified_base 10: mod_base = OTHER; note = 2'-fluorocytidine
  modified_base 11: mod_base = OTHER; note = 2'-fluoroadenosine
  modified_base 12: mod_base = OTHER; note = 2'-O-methyladenosine
  modified_base 13: mod_base = um
  modified_base 14: mod_base = OTHER; note = 2'-O-methyladenosine
  modified_base 15: mod_base = OTHER; note = 2'-O-methyladenosine
  modified_base 16: mod_base = OTHER; note = 2'-O-methyladenosine
  modified_base 17: mod_base = um
  modified_base 18: mod_base = gm
  modified_base 19: mod_base = um
  modified_base 20: mod_base = cm
  modified_base 21: mod_base = cm
  source 1..21: mol_type = other RNA
agtcacaaccaataaatgtcc

SEQ ID NO: 762 - RNA, 21 nt, synthetic construct
  modified_base 1: mod_base = OTHER; note = 2'-O-methyladenosine
  modified_base 1^2: mod_base = OTHER; note = phosphorothioate linkage
  modified_base 2: mod_base = OTHER; note = 2'-O-methyladenosine
  modified_base 3: mod_base = gm
  modified_base 4: mod_base = gm
  modified_base 5: mod_base = cm
  modified_base 6: mod_base = um
  modified_base 7: mod_base = gm
  modified_base 8: mod_base = cm
  modified_base 9: mod_base = OTHER; note = 2'-fluorocytidine
  modified_base 10: mod_base = OTHER; note = 2'-fluorouridine
  modified_base 11: mod_base = OTHER; note = 2'-fluorouridine
  modified_base 12: mod_base = OTHER; note = 2'-O-methyladenosine
  modified_base 13: mod_base = gm
  modified_base 14: mod_base = cm
  modified_base 15: mod_base = um
  modified_base 16: mod_base = OTHER; note = 2'-O-methyladenosine
  modified_base 17: mod_base = um
  modified_base 18: mod_base = cm
  modified_base 19: mod_base = um
  modified_base 20: mod_base = gm
  modified_base 21: mod_base = OTHER; note = 2'-O-methyladenosine
  source 1..21: mol_type = other RNA
aaggctgccttagctatctga

SEQ ID NO: 763 - RNA, 21 nt, synthetic construct
  modified_base 1: mod_base = cm
  modified_base 1^2: mod_base = OTHER; note = phosphorothioate linkage
  modified_base 2: mod_base = gm
  modified_base 3: mod_base = cm
  modified_base 4: mod_base = um
  modified_base 5: mod_base = um
  modified_base 6: mod_base = cm
  modified_base 7: mod_base = OTHER; note = 2'-O-methyladenosine
  modified_base 8: mod_base = OTHER; note = 2'-O-methyladenosine
  modified_base 9: mod_base = OTHER; note = 2'-fluorouridine
  modified_base 10: mod_base = OTHER; note = 2'-fluorocytidine
  modified_base 11: mod_base = OTHER; note = 2'-fluoroguanosine
  modified_base 12: mod_base = OTHER; note = 2'-O-methyladenosine
  modified_base 13: mod_base = cm
  modified_base 14: mod_base = cm
  modified_base 15: mod_base = um
  modified_base 16: mod_base = um
  modified_base 17: mod_base = um
  modified_base 18: mod_base = OTHER; note = 2'-O-methyladenosine
  modified_base 19: mod_base = cm
  modified_base 20: mod_base = um
  modified_base 21: mod_base = OTHER; note = 2'-O-methyladenosine
  source 1..21: mol_type = other RNA
cgcttcaatcgacctttacta

SEQ ID NO: 764 - RNA, 21 nt, synthetic construct
  modified_base 1: mod_base = gm
  modified_base 1^2: mod_base = OTHER; note = phosphorothioate linkage
  modified_base 2: mod_base = OTHER; note = 2'-O-methyl-2-aminoadenosine
  modified_base 3: mod_base = OTHER; note = 2'-O-methyladenosine
  modified_base 4: mod_base = OTHER; note = 2'-O-methyladenosine
  modified_base 5: mod_base = cm
  modified_base 6: mod_base = OTHER; note = 2'-O-methyladenosine
  modified_base 7: mod_base = um
  modified_base 8: mod_base = um
  modified_base 9: mod_base = OTHER; note = 2'-fluoroadenosine
  modified_base 10: mod_base = OTHER; note = 2'-fluoroadenosine
  modified_base 11: mod_base = OTHER; note = 2'-fluorocytidine
  modified_base 12: mod_base = um
  modified_base 13: mod_base = cm
  modified_base 14: mod_base = um
  modified_base 15: mod_base = OTHER; note = 2'-O-methyladenosine
  modified_base 16: mod_base = OTHER; note = 2'-O-methyladenosine
  modified_base 17: mod_base = cm
  modified_base 18: mod_base = um
  modified_base 19: mod_base = gm
  modified_base 20: mod_base = um
  modified_base 21: mod_base = OTHER; note = 2'-O-methyladenosine
  source 1..21: mol_type = other RNA
gnaacattaactctaactgta

SEQ ID NO: 765 - RNA, 21 nt, synthetic construct
  modified_base 1: mod_base = OTHER; note = 2'-O-methyl-2-aminoadenosine
  modified_base 1^2: mod_base = OTHER; note = phosphorothioate linkage
  modified_base 2: mod_base = cm
  modified_base 3: mod_base = OTHER; note = 2'-O-methyladenosine
  modified_base 4: mod_base = gm
  modified_base 5: mod_base = OTHER; note = 2'-O-methyladenosine
  modified_base 6: mod_base = OTHER; note = 2'-O-methyladenosine
  modified_base 7: mod_base = gm
  modified_base 8: mod_base = OTHER; note = 2'-O-methyladenosine
  modified_base 9: mod_base = OTHER; note = 2'-fluoroguanosine
  modified_base 10: mod_base = OTHER; note = 2'-fluorouridine
  modified_base 11: mod_base = OTHER; note = 2'-fluorouridine
  modified_base 12: mod_base = um
  modified_base 13: mod_base = cm
  modified_base 14: mod_base = um
  modified_base 15: mod_base = um
  modified_base 16: mod_base = OTHER; note = 2'-O-methyladenosine
  modified_base 17: mod_base = OTHER; note = 2'-O-methyladenosine
  modified_base 18: mod_base = cm
  modified_base 19: mod_base = um
  modified_base 20: mod_base = um
  modified_base 21: mod_base = OTHER; note = 2'-O-methyladenosine
  source 1..21: mol_type = other RNA
ncagaagagtttcttaactta

SEQ ID NO: 766 - RNA, 21 nt, synthetic construct
  modified_base 1: mod_base = gm
  modified_base 1^2: mod_base = OTHER; note = phosphorothioate linkage
  modified_base 2: mod_base = um
  modified_base 3: mod_base = OTHER; note = 2'-O-methyladenosine
  modified_base 4: mod_base = cm
  modified_base 5: mod_base = um
  modified_base 6: mod_base = OTHER; note = 2'-O-methyladenosine
  modified_base 7: mod_base = cm
  modified_base 8: mod_base = um
  modified_base 9: mod_base = OTHER; note = 2'-fluorocytidine
  modified_base 10: mod_base = OTHER; note = 2'-fluorocytidine
  modified_base 11: mod_base = OTHER; note = 2'-fluorouridine
  modified_base 12: mod_base = cm
  modified_base 13: mod_base = OTHER; note = 2'-O-methyladenosine
  modified_base 14: mod_base = OTHER; note = 2'-O-methyladenosine
  modified_base 15: mod_base = OTHER; note = 2'-O-methyladenosine
  modified_base 16: mod_base = um
  modified_base 17: mod_base = gm
  modified_base 18: mod_base = um
  modified_base 19: mod_base = um
  modified_base 20: mod_base = gm
  modified_base 21: mod_base = OTHER; note = 2'-O-methyladenosine
  source 1..21: mol_type = other RNA
gtactactcctcaaatgttga

SEQ ID NO: 767 - RNA, 21 nt, synthetic construct
  modified_base 1: mod_base = cm
  modified_base 1^2: mod_base = OTHER; note = phosphorothioate linkage
  modified_base 2: mod_base = um
  modified_base 3: mod_base = um
  modified_base 4: mod_base = cm
  modified_base 5: mod_base = cm
  modified_base 6: mod_base = OTHER; note = 2'-O-methyladenosine
  modified_base 7: mod_base = um
  modified_base 8: mod_base = OTHER; note = 2'-O-methyladenosine
  modified_base 9: mod_base = OTHER; note = 2'-fluoroadenosine
  modified_base 10: mod_base = OTHER; note = 2'-fluorocytidine
  modified_base 11: mod_base = OTHER; note = 2'-fluoroadenosine
  modified_base 12: mod_base = um
  modified_base 13: mod_base = um
  modified_base 14: mod_base = gm
  modified_base 15: mod_base = OTHER; note = 2'-O-methyladenosine
  modified_base 16: mod_base = um
  modified_base 17: mod_base = gm
  modified_base 18: mod_base = OTHER; note = 2'-O-methyladenosine
  modified_base 19: mod_base = cm
  modified_base 20: mod_base = um
  modified_base 21: mod_base = OTHER; note = 2'-O-methyladenosine
  source 1..21: mol_type = other RNA
cttccataacattgatgacta

SEQ ID NO: 768 - RNA, 21 nt, synthetic construct
  modified_base 1: mod_base = gm
  modified_base 1^2: mod_base = OTHER; note = phosphorothioate linkage
  modified_base 2: mod_base = cm
  modified_base 3: mod_base = OTHER; note = 2'-O-methyladenosine
  modified_base 4: mod_base = OTHER; note = 2'-O-methyladenosine
  modified_base 5: mod_base = um
  modified_base 6: mod_base = gm
  modified_base 7: mod_base = OTHER; note = 2'-O-methyladenosine
  modified_base 8: mod_base = um
  modified_base 9: mod_base = OTHER; note = 2'-fluoroadenosine
  modified_base 10: mod_base = OTHER; note = 2'-fluoroguanosine
  modified_base 11: mod_base = OTHER; note = 2'-fluorocytidine
  modified_base 12: mod_base = OTHER; note = 2'-O-methyladenosine
  modified_base 13: mod_base = cm
  modified_base 14: mod_base = cm
  modified_base 15: mod_base = um
  modified_base 16: mod_base = OTHER; note = 2'-O-methyladenosine
  modified_base 17: mod_base = OTHER; note = 2'-O-methyladenosine
  modified_base 18: mod_base = OTHER; note = 2'-O-methyladenosine
  modified_base 19: mod_base = cm
  modified_base 20: mod_base = um
  modified_base 21: mod_base = um
  source 1..21: mol_type = other RNA
gcaatgatagcacctaaactt

SEQ ID NO: 769 - RNA, 21 nt, synthetic construct
  modified_base 1: mod_base = OTHER; note = 2'-O-methyl-2-aminoadenosine
  modified_base 1^2: mod_base = OTHER; note = phosphorothioate linkage
  modified_base 2: mod_base = OTHER; note = 2'-O-methyladenosine
  modified_base 3: mod_base = gm
  modified_base 4: mod_base = OTHER; note = 2'-O-methyladenosine
  modified_base 5: mod_base = cm
  modified_base 6: mod_base = OTHER; note = 2'-O-methyladenosine
  modified_base 7: mod_base = gm
  modified_base 8: mod_base = OTHER; note = 2'-O-methyladenosine
  modified_base 9: mod_base = OTHER; note = 2'-fluorocytidine
  modified_base 10: mod_base = OTHER; note = 2'-fluoroadenosine
  modified_base 11: mod_base = OTHER; note = 2'-fluorouridine
  modified_base 12: mod_base = um
  modified_base 13: mod_base = cm
  modified_base 14: mod_base = cm
  modified_base 15: mod_base = um
  modified_base 16: mod_base = um
  modified_base 17: mod_base = cm
  modified_base 18: mod_base = um
  modified_base 19: mod_base = OTHER; note = 2'-O-methyladenosine
  modified_base 20: mod_base = cm
  modified_base 21: mod_base = OTHER; note = 2'-O-methyladenosine
  source 1..21: mol_type = other RNA
nagacagacattccttctaca

SEQ ID NO: 770 - RNA, 21 nt, synthetic construct
  modified_base 1: mod_base = cm
  modified_base 1^2: mod_base = OTHER; note = phosphorothioate linkage
  modified_base 2: mod_base = OTHER; note = 2'-O-methyl-2-aminoadenosine
  modified_base 3: mod_base = um
  modified_base 4: mod_base = gm
  modified_base 5: mod_base = um
  modified_base 6: mod_base = OTHER; note = 2'-O-methyladenosine
  modified_base 7: mod_base = OTHER; note = 2'-O-methyladenosine
  modified_base 8: mod_base = um
  modified_base 9: mod_base = OTHER; note = 2'-fluoroguanosine
  modified_base 10: mod_base = OTHER; note = 2'-fluoroadenosine
  modified_base 11: mod_base = OTHER; note = 2'-fluorocytidine
  modified_base 12: mod_base = OTHER; note = 2'-O-methyladenosine
  modified_base 13: mod_base = cm
  modified_base 14: mod_base = um
  modified_base 15: mod_base = um
  modified_base 16: mod_base = cm
  modified_base 17: mod_base = um
  modified_base 18: mod_base = um
  modified_base 19: mod_base = gm
  modified_base 20: mod_base = um
  modified_base 21: mod_base = OTHER; note = 2'-O-methyladenosine
  source 1..21: mol_type = other RNA
cntgtaatgacacttcttgta

SEQ ID NO: 771 - RNA, 21 nt, synthetic construct
  modified_base 1: mod_base = OTHER; note = 2'-O-methyl-2-aminoadenosine
  modified_base 1^2: mod_base = OTHER; note = phosphorothioate linkage
  modified_base 2: mod_base = um
  modified_base 3: mod_base = OTHER; note = 2'-O-methyladenosine
  modified_base 4: mod_base = cm
  modified_base 5: mod_base = OTHER; note = 2'-O-methyladenosine
  modified_base 6: mod_base = OTHER; note = 2'-O-methyladenosine
  modified_base 7: mod_base = gm
  modified_base 8: mod_base = um
  modified_base 9: mod_base = OTHER; note = 2'-fluoroadenosine
  modified_base 10: mod_base = OTHER; note = 2'-fluoroguanosine
  modified_base 11: mod_base = OTHER; note = 2'-fluoroadenosine
  modified_base 12: mod_base = um
  modified_base 13: mod_base = cm
  modified_base 14: mod_base = cm
  modified_base 15: mod_base = um
  modified_base 16: mod_base = gm
  modified_base 17: mod_base = OTHER; note = 2'-O-methyladenosine
  modified_base 18: mod_base = gm
  modified_base 19: mod_base = OTHER; note = 2'-O-methyladenosine
  modified_base 20: mod_base = OTHER; note = 2'-O-methyladenosine
  modified_base 21: mod_base = OTHER; note = 2'-O-methyladenosine
  source 1..21: mol_type = other RNA
ntacaagtagatcctgagaaa

SEQ ID NO: 772 - RNA, 21 nt, synthetic construct
  modified_base 1: mod_base = OTHER; note = 2'-O-methyladenosine
  modified_base 1^2: mod_base = OTHER; note = phosphorothioate linkage
  modified_base 2: mod_base = gm
  modified_base 3: mod_base = um
  modified_base 4: mod_base = cm
  modified_base 5: mod_base = OTHER; note = 2'-O-methyladenosine
  modified_base 6: mod_base = cm
  modified_base 7: mod_base = OTHER; note = 2'-O-methyladenosine
  modified_base 8: mod_base = OTHER; note = 2'-O-methyladenosine
  modified_base 9: mod_base = OTHER; note = 2'-fluorocytidine
  modified_base 10: mod_base = OTHER; note = 2'-fluorocytidine
  modified_base 11: mod_base = OTHER; note = 2'-fluoroadenosine
  modified_base 12: mod_base = OTHER; note = 2'-O-methyladenosine
  modified_base 13: mod_base = um
  modified_base 14: mod_base = OTHER; note = 2'-O-methyladenosine
  modified_base 15: mod_base = OTHER; note = 2'-O-methyladenosine
  modified_base 16: mod_base = OTHER; note = 2'-O-methyladenosine
  modified_base 17: mod_base = um
  modified_base 18: mod_base = gm
  modified_base 19: mod_base = um
  modified_base 20: mod_base = cm
  modified_base 21: mod_base = um
  source 1..21: mol_type = other RNA
agtcacaaccaataaatgtct

SEQ ID NO: 773 - RNA, 22 nt, synthetic construct
  modified_base 1: mod_base = OTHER; note = 2'-O-methyladenosine
  modified_base 1^2: mod_base = OTHER; note = phosphorothioate linkage
  modified_base 2: mod_base = gm
  modified_base 3: mod_base = um
  modified_base 4: mod_base = cm
  modified_base 5: mod_base = OTHER; note = 2'-O-methyladenosine
  modified_base 6: mod_base = cm
  modified_base 7: mod_base = OTHER; note = 2'-O-methyladenosine
  modified_base 8: mod_base = OTHER; note = 2'-O-methyladenosine
  modified_base 9: mod_base = OTHER; note = 2'-fluorocytidine
  modified_base 10: mod_base = OTHER; note = 2'-fluorocytidine
  modified_base 11: mod_base = OTHER; note = 2'-fluoroadenosine
  modified_base 12: mod_base = OTHER; note = 2'-O-methyladenosine
  modified_base 13: mod_base = um
  modified_base 14: mod_base = OTHER; note = 2'-O-methyladenosine
  modified_base 15: mod_base = OTHER; note = 2'-O-methyladenosine
  modified_base 16: mod_base = OTHER; note = 2'-O-methyladenosine
  modified_base 17: mod_base = um
  modified_base 18: mod_base = gm
  modified_base 19: mod_base = um
  modified_base 20: mod_base = cm
  modified_base 21: mod_base = um
  modified_base 22: mod_base = OTHER; note = 2'-deoxythymidine
  source 1..22: mol_type = other RNA
agtcacaaccaataaatgtctt

SEQ ID NO: 774 - RNA, 21 nt, synthetic construct
  modified_base 1: mod_base = gm
  modified_base 2: mod_base = gm
  modified_base 3: mod_base = OTHER; note = 2'-O-methyladenosine
  modified_base 4: mod_base = OTHER; note = 2'-O-methyladenosine
  modified_base 5: mod_base = OTHER; note = 2'-O-methyladenosine
  modified_base 6: mod_base = cm
  modified_base 7: mod_base = um
  modified_base 8: mod_base = cm
  modified_base 9: mod_base = OTHER; note = 2'-fluoroadenosine
  modified_base 10: mod_base = OTHER; note = 2'-fluoroguanosine
  modified_base 11: mod_base = OTHER; note = 2'-fluoroadenosine
  modified_base 12: mod_base = um
  modified_base 13: mod_base = OTHER; note = 2'-O-methyladenosine
  modified_base 14: mod_base = OTHER; note = 2'-O-methyladenosine
  modified_base 15: mod_base = OTHER; note = 2'-O-methyladenosine
  modified_base 16: mod_base = um
  modified_base 17: mod_base = gm
  modified_base 18: mod_base = cm
  modified_base 19: mod_base = um
  modified_base 20: mod_base = OTHER; note = 2'-O-methyladenosine
  modified_base 21: mod_base = OTHER; note = 2'-O-methyladenosine
  source 1..21: mol_type = other RNA
ggaaactcagataaatgctaa

SEQ ID NO: 775 - RNA, 21 nt, synthetic construct
  modified_base 1: mod_base = OTHER; note = 2'-O-methyladenosine
  modified_base 2: mod_base = gm
  modified_base 3: mod_base = um
  modified_base 4: mod_base = cm
  modified_base 5: mod_base = OTHER; note = 2'-O-methyladenosine
  modified_base 6: mod_base = cm
  modified_base 7: mod_base = OTHER; note = 2'-O-methyladenosine
  modified_base 8: mod_base = OTHER; note = 2'-O-methyladenosine
  modified_base 9: mod_base = OTHER; note = 2'-fluorocytidine
  modified_base 10: mod_base = OTHER; note = 2'-fluorocytidine
  modified_base 11: mod_base = OTHER; note = 2'-fluoroadenosine
  modified_base 12: mod_base = OTHER; note = 2'-O-methyladenosine
  modified_base 13: mod_base = um
  modified_base 14: mod_base = OTHER; note = 2'-O-methyladenosine
  modified_base 15: mod_base = OTHER; note = 2'-O-methyladenosine
  modified_base 16: mod_base = OTHER; note = 2'-O-methyladenosine
  modified_base 17: mod_base = um
  modified_base 18: mod_base = gm
  modified_base 19: mod_base = um
  modified_base 20: mod_base = cm
  modified_base 21: mod_base = um
  source 1..21: mol_type = other RNA
agtcacaaccaataaatgtct

SEQ ID NO: 776 - RNA, 21 nt, synthetic construct
  modified_base 1: mod_base = OTHER; note = 2'-O-methyl-2-aminoadenosine
  modified_base 1^2: mod_base = OTHER; note = phosphorothioate linkage
  modified_base 2: mod_base = OTHER; note = 2'-O-methyladenosine
  modified_base 3: mod_base = gm
  modified_base 4: mod_base = um
  modified_base 5: mod_base = cm
  modified_base 6: mod_base = OTHER; note = 2'-O-methyladenosine
  modified_base 7: mod_base = cm
  modified_base 8: mod_base = OTHER; note = 2'-O-methyladenosine
  modified_base 9: mod_base = OTHER; note = 2'-fluoroadenosine
  modified_base 10: mod_base = OTHER; note = 2'-fluorocytidine
  modified_base 11: mod_base = OTHER; note = 2'-fluorocytidine
  modified_base 12: mod_base = OTHER; note = 2'-O-methyladenosine
  modified_base 13: mod_base = OTHER; note = 2'-O-methyladenosine
  modified_base 14: mod_base = um
  modified_base 15: mod_base = OTHER; note = 2'-O-methyladenosine
  modified_base 16: mod_base = OTHER; note = 2'-O-methyladenosine
  modified_base 17: mod_base = OTHER; note = 2'-O-methyladenosine
  modified_base 18: mod_base = um
  modified_base 19: mod_base = gm
  modified_base 20: mod_base = um
  modified_base 21: mod_base = OTHER; note = 2'-O-methyladenosine
  source 1..21: mol_type = other RNA
nagtcacaaccaataaatgta

SEQ ID NO: 777 - RNA, 21 nt, synthetic construct
  modified_base 1: mod_base = OTHER; note = 2'-O-methyladenosine
  modified_base 1^2: mod_base = OTHER; note = phosphorothioate linkage
  modified_base 2: mod_base = gm
  modified_base 3: mod_base = um
  modified_base 4: mod_base = cm
  modified_base 5: mod_base = OTHER; note = 2'-O-methyladenosine
  modified_base 6: mod_base = cm
  modified_base 7: mod_base = OTHER; note = 2'-O-methyladenosine
  modified_base 8: mod_base = OTHER; note = 2'-O-methyladenosine
  modified_base 9: mod_base = OTHER; note = 2'-fluorocytidine
  modified_base 10: mod_base = OTHER; note = 2'-fluorocytidine
  modified_base 11: mod_base = OTHER; note = 2'-fluoroadenosine
  modified_base 12: mod_base = OTHER; note = 2'-O-methyladenosine
  modified_base 13: mod_base = um
  modified_base 14: mod_base = OTHER; note = 2'-O-methyladenosine
  modified_base 15: mod_base = OTHER; note = 2'-O-methyladenosine
  modified_base 16: mod_base = OTHER; note = 2'-O-methyladenosine
  modified_base 17: mod_base = um
  modified_base 18: mod_base = gm
  modified_base 19: mod_base = um
  modified_base 20: mod_base = cm
  modified_base 21: mod_base = um
  source 1..21: mol_type = other RNA
agtcacaaccaataaatgtct

SEQ ID NO: 778 - RNA, 21 nt, synthetic construct
  modified_base 1: mod_base = gm
  modified_base 1^2: mod_base = OTHER; note = phosphorothioate linkage
  modified_base 2: mod_base = gm
  modified_base 3: mod_base = OTHER; note = 2'-O-methyladenosine
  modified_base 4: mod_base = OTHER; note = 2'-O-methyladenosine
  modified_base 5: mod_base = OTHER; note = 2'-O-methyladenosine
  modified_base 6: mod_base = cm
  modified_base 7: mod_base = um
  modified_base 8: mod_base = cm
  modified_base 9: mod_base = OTHER; note = 2'-fluoroadenosine
  modified_base 10: mod_base = gm
  modified_base 11: mod_base = OTHER; note = 2'-fluoroadenosine
  modified_base 12: mod_base = um
  modified_base 13: mod_base = OTHER; note = 2'-fluoroadenosine
  modified_base 14: mod_base = OTHER; note = 2'-O-methyladenosine
  modified_base 15: mod_base = OTHER; note = 2'-O-methyladenosine
  modified_base 16: mod_base = um
  modified_base 17: mod_base = gm
  modified_base 18: mod_base = cm
  modified_base 19: mod_base = um
  modified_base 20: mod_base = OTHER; note = 2'-O-methyladenosine
  modified_base 21: mod_base = OTHER; note = 2'-O-methyladenosine
  source 1..21: mol_type = other RNA
ggaaactcagataaatgctaa

SEQ ID NO: 779 - RNA, 21 nt, synthetic construct
  modified_base 1: mod_base = gm
  modified_base 1^2: mod_base = OTHER; note = phosphorothioate linkage
  modified_base 2: mod_base = gm
  modified_base 3: mod_base = um
  modified_base 4: mod_base = cm
  modified_base 5: mod_base = OTHER; note = 2'-O-methyladenosine
  modified_base 6: mod_base = cm
  modified_base 7: mod_base = OTHER; note = 2'-O-methyladenosine
  modified_base 8: mod_base = OTHER; note = 2'-O-methyladenosine
  modified_base 9: mod_base = OTHER; note = 2'-fluorocytidine
  modified_base 10: mod_base = OTHER; note = 2'-fluorocytidine
  modified_base 11: mod_base = OTHER; note = 2'-fluoroadenosine
  modified_base 12: mod_base = OTHER; note = 2'-O-methyladenosine
  modified_base 13: mod_base = um
  modified_base 14: mod_base = OTHER; note = 2'-O-methyladenosine
  modified_base 15: mod_base = OTHER; note = 2'-O-methyladenosine
  modified_base 16: mod_base = OTHER; note = 2'-O-methyladenosine
  modified_base 17: mod_base = um
  modified_base 18: mod_base = gm
  modified_base 19: mod_base = um
  modified_base 20: mod_base = cm
  modified_base 21: mod_base = um
  source 1..21: mol_type = other RNA
ggtcacaaccaataaatgtct

SEQ ID NO: 780 - RNA, 21 nt, synthetic construct
  modified_base 1: mod_base = gm
  modified_base 1^2: mod_base = OTHER; note = phosphorothioate linkage
  modified_base 2: mod_base = gm
  modified_base 3: mod_base = um
  modified_base 4: mod_base = cm
  modified_base 5: mod_base = OTHER; note = 2'-O-methyladenosine
  modified_base 6: mod_base = cm
  modified_base 7: mod_base = OTHER; note = 2'-O-methyladenosine
  modified_base 8: mod_base = OTHER; note = 2'-O-methyladenosine
  modified_base 9: mod_base = OTHER; note = 2'-fluorocytidine
  modified_base 10: mod_base = OTHER; note = 2'-fluorocytidine
  modified_base 11: mod_base = OTHER; note = 2'-fluoroadenosine
  modified_base 12: mod_base = OTHER; note = 2'-O-methyladenosine
  modified_base 13: mod_base = um
  modified_base 14: mod_base = OTHER; note = 2'-O-methyladenosine
  modified_base 15: mod_base = OTHER; note = 2'-O-methyladenosine
  modified_base 16: mod_base = OTHER; note = 2'-O-methyladenosine
  modified_base 17: mod_base = um
  modified_base 18: mod_base = gm
  modified_base 19: mod_base = um
  modified_base 20: mod_base = cm
  modified_base 21: mod_base = OTHER; note = 2'-O-methyladenosine
  source 1..21: mol_type = other RNA
ggtcacaaccaataaatgtca

SEQ ID NO: 781 - RNA, 21 nt, synthetic construct
  modified_base 1: mod_base = OTHER; note = 2'-O-methyladenosine
  modified_base 1^2: mod_base = OTHER; note = phosphorothioate linkage
  modified_base 2: mod_base = gm
  modified_base 3: mod_base = um
  modified_base 4: mod_base = cm
  modified_base 5: mod_base = OTHER; note = 2'-O-methyladenosine
  modified_base 6: mod_base = cm
  modified_base 7: mod_base = OTHER; note = 2'-O-methyladenosine
  modified_base 8: mod_base = OTHER; note = 2'-O-methyladenosine
  modified_base 9: mod_base = OTHER; note = 2'-fluorocytidine
  modified_base 10: mod_base = OTHER; note = 2'-fluorocytidine
  modified_base 11: mod_base = OTHER; note = 2'-fluoroadenosine
  modified_base 12: mod_base = OTHER; note = 2'-O-methyladenosine
  modified_base 13: mod_base = um
  modified_base 14: mod_base = OTHER; note = 2'-O-methyladenosine
  modified_base 15: mod_base = OTHER; note = 2'-O-methyladenosine
  modified_base 16: mod_base = OTHER; note = 2'-O-methyladenosine
  modified_base 17: mod_base = um
  modified_base 18: mod_base = gm
  modified_base 19: mod_base = um
  modified_base 20: mod_base = cm
  modified_base 21: mod_base = OTHER; note = 2'-O-methyladenosine
  source 1..21: mol_type = other RNA
agtcacaaccaataaatgtca

SEQ ID NO: 782 - RNA, 21 nt, synthetic construct
  modified_base 1: mod_base = gm
  modified_base 1^2: mod_base = OTHER; note = phosphorothioate linkage
  modified_base 2: mod_base = OTHER; note = 2'-O-methyl-2-aminoadenosine
  modified_base 3: mod_base = OTHER; note = 2'-O-methyladenosine
  modified_base 4: mod_base = um
  modified_base 5: mod_base = cm
  modified_base 6: mod_base = OTHER; note = 2'-O-methyladenosine
  modified_base 7: mod_base = OTHER; note = 2'-O-methyladenosine
  modified_base 8: mod_base = OTHER; note = 2'-O-methyladenosine
  modified_base 9: mod_base = OTHER; note = 2'-fluorocytidine
  modified_base 10: mod_base = OTHER; note = 2'-fluorocytidine
  modified_base 11: mod_base = OTHER; note = 2'-fluorouridine
  modified_base 12: mod_base = cm
  modified_base 13: mod_base = OTHER; note = 2'-O-methyladenosine
  modified_base 14: mod_base = cm
  modified_base 15: mod_base = OTHER; note = 2'-O-methyladenosine
  modified_base 16: mod_base = OTHER; note = 2'-O-methyladenosine
  modified_base 17: mod_base = OTHER; note = 2'-O-methyladenosine
  modified_base 18: mod_base = um
  modified_base 19: mod_base = um
  modified_base 20: mod_base = cm
  modified_base 21: mod_base = um
  source 1..21: mol_type = other RNA
gnatcaaacctcacaaattct

SEQ ID NO: 783 - RNA, 21 nt, synthetic construct
  modified_base 1: mod_base = cm
  modified_base 1^2: mod_base = OTHER; note = phosphorothioate linkage
  modified_base 2: mod_base = um
  modified_base 3: mod_base = gm
  modified_base 4: mod_base = OTHER; note = 2'-O-methyladenosine
  modified_base 5: mod_base = OTHER; note = 2'-O-methyladenosine
  modified_base 6: mod_base = OTHER; note = 2'-O-methyladenosine
  modified_base 7: mod_base = cm
  modified_base 8: mod_base = um
  modified_base 9: mod_base = OTHER; note = 2'-fluoroguanosine
  modified_base 10: mod_base = OTHER; note = 2'-fluoroadenosine
  modified_base 11: mod_base = OTHER; note = 2'-fluoroguanosine
  modified_base 12: mod_base = OTHER; note = 2'-O-methyladenosine
  modified_base 13: mod_base = gm
  modified_base 14: mod_base = OTHER; note = 2'-O-methyladenosine
  modified_base 15: mod_base = OTHER; note = 2'-O-methyladenosine
  modified_base 16: mod_base = OTHER; note = 2'-O-methyladenosine
  modified_base 17: mod_base = um
  modified_base 18: mod_base = gm
  modified_base 19: mod_base = gm
  modified_base 20: mod_base = um
  modified_base 21: mod_base = OTHER; note = 2'-O-methyladenosine
  source 1..21: mol_type = other RNA
ctgaaactgagagaaatggta

SEQ ID NO: 784 - RNA, 21 nt, synthetic construct
  modified_base 1: mod_base = cm
  modified_base 1^2: mod_base = OTHER; note = phosphorothioate linkage
  modified_base 2: mod_base = OTHER; note = 2'-O-methyl-2-aminoadenosine
  modified_base 3: mod_base = um
  modified_base 4: mod_base = um
  modified_base 5: mod_base = gm
  modified_base 6: mod_base = cm
  modified_base 7: mod_base = cm
  modified_base 8: mod_base = um
  modified_base 9: mod_base = OTHER; note = 2'-fluorouridine
  modified_base 10: mod_base = OTHER; note = 2'-fluoroadenosine
  modified_base 11: mod_base = OTHER; note = 2'-fluorocytidine
  modified_base 12: mod_base = um
  modified_base 13: mod_base = gm
  modified_base 14: mod_base = OTHER; note = 2'-O-methyladenosine
  modified_base 15: mod_base = OTHER; note = 2'-O-methyladenosine
  modified_base 16: mod_base = OTHER; note = 2'-O-methyladenosine
  modified_base 17: mod_base = um
  modified_base 18: mod_base = cm
  modified_base 19: mod_base = cm
  modified_base 20: mod_base = OTHER; note = 2'-O-methyladenosine
  modified_base 21: mod_base = OTHER; note = 2'-O-methyladenosine
  source 1..21: mol_type = other RNA
cnttgccttactgaaatccaa

SEQ ID NO: 785 - RNA, 21 nt, synthetic construct
  modified_base 1: mod_base = gm
  modified_base 1^2: mod_base = OTHER; note = phosphorothioate linkage
  modified_base 2: mod_base = OTHER; note = 2'-O-methyl-2-aminoadenosine
  modified_base 3: mod_base = OTHER; note = 2'-O-methyladenosine
  modified_base 4: mod_base = OTHER; note = 2'-O-methyladenosine
  modified_base 5: mod_base = um
  modified_base 6: mod_base = cm
  modified_base 7: mod_base = cm
  modified_base 8: mod_base = OTHER; note = 2'-O-methyladenosine
  modified_base 9: mod_base = OTHER; note = 2'-fluoroguanosine
  modified_base 10: mod_base = OTHER; note = 2'-fluoroadenosine
  modified_base 11: mod_base = OTHER; note = 2'-fluoroguanosine
  modified_base 12: mod_base = cm
  modified_base 13: mod_base = cm
  modified_base 14: mod_base = um
  modified_base 15: mod_base = OTHER; note = 2'-O-methyladenosine
  modified_base 16: mod_base = OTHER; note = 2'-O-methyladenosine
  modified_base 17: mod_base = cm
  modified_base 18: mod_base = cm
  modified_base 19: mod_base = um
  modified_base 20: mod_base = um
  modified_base 21: mod_base = OTHER; note = 2'-O-methyladenosine
  source 1..21: mol_type = other RNA
gnaatccagagcctaacctta

SEQ ID NO: 786 - RNA, 21 nt, synthetic construct
  modified_base 1: mod_base = gm
  modified_base 1^2: mod_base = OTHER; note = phosphorothioate linkage
  modified_base 2: mod_base = OTHER; note = 2'-O-methyladenosine
  modified_base 3: mod_base = um
  modified_base 4: mod_base = um
  modified_base 5: mod_base = cm
  modified_base 6: mod_base = gm
  modified_base 7: mod_base = gm
  modified_base 8: mod_base = OTHER; note = 2'-O-methyladenosine
  modified_base 9: mod_base = OTHER; note = 2'-fluoroadenosine
  modified_base 10: mod_base = OTHER; note = 2'-fluoroadenosine
  modified_base 11: mod_base = OTHER; note = 2'-fluorocytidine
  modified_base 12: mod_base = um
  modified_base 13: mod_base = cm
  modified_base 14: mod_base = OTHER; note = 2'-O-methyladenosine
  modified_base 15: mod_base = gm
  modified_base 16: mod_base = OTHER; note = 2'-O-methyladenosine
  modified_base 17: mod_base = um
  modified_base 18: mod_base = OTHER; note = 2'-O-methyladenosine
  modified_base 19: mod_base = OTHER; note = 2'-O-methyladenosine
  modified_base 20: mod_base = OTHER; note = 2'-O-methyl-2-aminoadenosine
  modified_base 21: mod_base = um
  source 1..21: mol_type = other RNA
gattcggaaactcagataant

SEQ ID NO: 787 - RNA, 21 nt, synthetic construct
  modified_base 1: mod_base = OTHER; note = 2'-O-methyl-2-aminoadenosine
  modified_base 1^2: mod_base = OTHER; note = phosphorothioate linkage
  modified_base 2: mod_base = OTHER; note = 2'-O-methyladenosine
  modified_base 3: mod_base = gm
  modified_base 4: mod_base = um
  modified_base 5: mod_base = cm
  modified_base 6: mod_base = OTHER; note = 2'-O-methyladenosine
  modified_base 7: mod_base = cm
  modified_base 8: mod_base = OTHER; note = 2'-O-methyladenosine
  modified_base 9: mod_base = OTHER; note = 2'-fluoroadenosine
  modified_base 10: mod_base = OTHER; note = 2'-fluorocytidine
  modified_base 11: mod_base = OTHER; note = 2'-fluorocytidine
  modified_base 12: mod_base = OTHER; note = 2'-O-methyladenosine
  modified_base 13: mod_base = OTHER; note = 2'-O-methyladenosine
  modified_base 14: mod_base = um
  modified_base 15: mod_base = OTHER; note = 2'-O-methyladenosine
  modified_base 16: mod_base = OTHER; note = 2'-O-methyladenosine
  modified_base 17: mod_base = OTHER; note = 2'-O-methyladenosine
  modified_base 18: mod_base = um
  modified_base 19: mod_base = gm
  modified_base 20: mod_base = um
  modified_base 21: mod_base = OTHER; note = 2'-O-methyladenosine
  source 1..21: mol_type = other RNA
nagtcacaaccaataaatgta

SEQ ID NO: 788 - RNA, 21 nt, synthetic construct
  modified_base 1: mod_base = OTHER; note = 2'-O-methyladenosine
  modified_base 1^2: mod_base = OTHER; note = phosphorothioate linkage
  modified_base 2: mod_base = gm
  modified_base 3: mod_base = um
  modified_base 4: mod_base = cm
  modified_base 5: mod_base = OTHER; note = 2'-O-methyladenosine
  modified_base 6: mod_base = cm
  modified_base 7: mod_base = OTHER; note = 2'-O-methyladenosine
  modified_base 8: mod_base = OTHER; note = 2'-O-methyladenosine
  modified_base 9: mod_base = OTHER; note = 2'-fluorocytidine
  modified_base 10: mod_base = OTHER; note = 2'-fluorocytidine
  modified_base 11: mod_base = OTHER; note = 2'-fluoroadenosine
  modified_base 12: mod_base = OTHER; note = 2'-O-methyladenosine
  modified_base 13: mod_base = um
  modified_base 14: mod_base = OTHER; note = 2'-O-methyladenosine
  modified_base 15: mod_base = OTHER; note = 2'-O-methyladenosine
  modified_base 16: mod_base = OTHER; note = 2'-O-methyladenosine
  modified_base 17: mod_base = um
  modified_base 18: mod_base = gm
  modified_base 19: mod_base = um
  modified_base 20: mod_base = cm
  modified_base 21: mod_base = um
  source 1..21: mol_type = other RNA
agtcacaaccaataaatgtct

SEQ ID NO: 789 - RNA, 21 nt, synthetic construct
  modified_base 1: mod_base = gm
  modified_base 1^2: mod_base = OTHER; note = phosphorothioate linkage
  modified_base 2: mod_base = OTHER; note = 2'-O-methyladenosine
  modified_base 3: mod_base = OTHER; note = 2'-O-methyladenosine
  modified_base 4: mod_base = OTHER; note = 2'-O-methyladenosine
  modified_base 5: mod_base = gm
  modified_base 6: mod_base = um
  modified_base 7: mod_base = cm
  modified_base 8: mod_base = OTHER; note = 2'-O-methyladenosine
  modified_base 9: mod_base = OTHER; note = 2'-fluorocytidine
  modified_base 10: mod_base = OTHER; note = 2'-fluoroadenosine
  modified_base 11: mod_base = OTHER; note = 2'-fluoroadenosine
  modified_base 12: mod_base = cm
  modified_base 13: mod_base = cm
  modified_base 14: mod_base = OTHER; note = 2'-O-methyladenosine
  modified_base 15: mod_base = OTHER; note = 2'-O-methyladenosine
  modified_base 16: mod_base = um
  modified_base 17: mod_base = OTHER; note = 2'-O-methyladenosine
  modified_base 18: mod_base = OTHER; note = 2'-O-methyladenosine
  modified_base 19: mod_base = OTHER; note = 2'-O-methyl-2-aminoadenosine
  modified_base 20: mod_base = um
  modified_base 21: mod_base = OTHER; note = 2'-O-methyladenosine
  source 1..21: mol_type = other RNA
gaaagtcacaaccaataanta

SEQ ID NO: 790 - RNA, 21 nt, synthetic construct
  modified_base 1: mod_base = gm
  modified_base 1^2: mod_base = OTHER; note = phosphorothioate linkage
  modified_base 2: mod_base = gm
  modified_base 3: mod_base = OTHER; note = 2'-O-methyladenosine
  modified_base 4: mod_base = OTHER; note = 2'-O-methyladenosine
  modified_base 5: mod_base = OTHER; note = 2'-O-methyladenosine
  modified_base 6: mod_base = cm
  modified_base 7: mod_base = um
  modified_base 8: mod_base = cm
  modified_base 9: mod_base = OTHER; note = 2'-fluoroadenosine
  modified_base 10: mod_base = OTHER; note = 2'-fluoroguanosine
  modified_base 11: mod_base = OTHER; note = 2'-fluoroadenosine
  modified_base 12: mod_base = um
  modified_base 13: mod_base = OTHER; note = 2'-O-methyladenosine
  modified_base 14: mod_base = OTHER; note = 2'-O-methyladenosine
  modified_base 15: mod_base = OTHER; note = 2'-O-methyladenosine
  modified_base 16: mod_base = um
  modified_base 17: mod_base = gm
  modified_base 18: mod_base = cm
  modified_base 19: mod_base = um
  modified_base 20: mod_base = OTHER; note = 2'-O-methyladenosine
  modified_base 21: mod_base = OTHER; note = 2'-O-methyladenosine
  source 1..21: mol_type = other RNA
ggaaactcagataaatgctaa

SEQ ID NO: 791 - RNA, 21 nt, synthetic construct
  modified_base 1: mod_base = OTHER; note = 2'-O-methyladenosine
  modified_base 1^2: mod_base = OTHER; note = phosphorothioate linkage
  modified_base 2: mod_base = um
  modified_base 3: mod_base = cm
  modified_base 4: mod_base = cm
  modified_base 5: mod_base = OTHER; note = 2'-O-methyladenosine
  modified_base 6: mod_base = gm
  modified_base 7: mod_base = OTHER; note = 2'-O-methyladenosine
  modified_base 8: mod_base = gm
  modified_base 9: mod_base = OTHER; note = 2'-fluorocytidine
  modified_base 10: mod_base = OTHER; note = 2'-fluorocytidine
  modified_base 11: mod_base = OTHER; note = 2'-fluorouridine
  modified_base 12: mod_base = OTHER; note = 2'-O-methyladenosine
  modified_base 13: mod_base = OTHER; note = 2'-O-methyladenosine
  modified_base 14: mod_base = cm
  modified_base 15: mod_base = cm
  modified_base 16: mod_base = um
  modified_base 17: mod_base = um
  modified_base 18: mod_base = cm
  modified_base 19: mod_base = OTHER; note = 2'-O-methyladenosine
  modified_base 20: mod_base = OTHER; note = 2'-O-methyladenosine
  modified_base 21: mod_base = um
  source 1..21: mol_type = other RNA
atccagagcctaaccttcaat

SEQ ID NO: 792 - RNA, 21 nt, synthetic construct
  modified_base 1: mod_base = um
  modified_base 1^2: mod_base = OTHER; note = phosphorothioate linkage
  modified_base 2: mod_base = OTHER; note = 2'-O-methyl-2-aminoadenosine
  modified_base 3: mod_base = cm
  modified_base 4: mod_base = um
  modified_base 5: mod_base = gm
  modified_base 6: mod_base = OTHER; note = 2'-O-methyladenosine
  modified_base 7: mod_base = OTHER; note = 2'-O-methyladenosine
  modified_base 8: mod_base = OTHER; note = 2'-O-methyladenosine
  modified_base 9: mod_base = OTHER; note = 2'-fluorouridine
  modified_base 10: mod_base = OTHER; note = 2'-fluorocytidine
  modified_base 11: mod_base = OTHER; note = 2'-fluorocytidine
  modified_base 12: mod_base = OTHER; note = 2'-O-methyladenosine
  modified_base 13: mod_base = gm
  modified_base 14: mod_base = OTHER; note = 2'-O-methyladenosine
  modified_base 15: mod_base = gm
  modified_base 16: mod_base = cm
  modified_base 17: mod_base = cm
  modified_base 18: mod_base = um
  modified_base 19: mod_base = OTHER; note = 2'-O-methyladenosine
  modified_base 20: mod_base = OTHER; note = 2'-O-methyladenosine
  modified_base 21: mod_base = OTHER; note = 2'-O-methyladenosine
  source 1..21: mol_type = other RNA
tnctgaaatccagagcctaaa

SEQ ID NO: 793 - RNA, 21 nt, synthetic construct
  modified_base 1: mod_base = gm
  modified_base 1^2: mod_base = OTHER; note = phosphorothioate linkage
  modified_base 2: mod_base = gm
  modified_base 3: mod_base = OTHER; note = 2'-O-methyladenosine
  modified_base 4: mod_base = OTHER; note = 2'-O-methyladenosine
  modified_base 5: mod_base = OTHER; note = 2'-O-methyladenosine
  modified_base 6: mod_base = cm
  modified_base 7: mod_base = um
  modified_base 8: mod_base = cm
  modified_base 9: mod_base = OTHER; note = 2'-fluoroadenosine
  modified_base 10: mod_base = gm
  modified_base 11: mod_base = OTHER; note = 2'-fluoroadenosine
  modified_base 12: mod_base = um
  modified_base 13: mod_base = OTHER; note = 2'-fluoroadenosine
  modified_base 14: mod_base = OTHER; note = 2'-O-methyladenosine
  modified_base 15: mod_base = OTHER; note = 2'-O-methyladenosine
  modified_base 16: mod_base = um
  modified_base 17: mod_base = gm
  modified_base 18: mod_base = cm
  modified_base 19: mod_base = um
  modified_base 20: mod_base = OTHER; note = 2'-O-methyladenosine
  modified_base 21: mod_base = OTHER; note = 2'-O-methyladenosine
  source 1..21: mol_type = other RNA
ggaaactcagataaatgctaa

SEQ ID NO: 794 - RNA, 21 nt, synthetic construct
  modified_base 1: mod_base = OTHER; note = 2'-O-methyladenosine
  modified_base 1^2: mod_base = OTHER; note = phosphorothioate linkage
  modified_base 2: mod_base = gm
  modified_base 3: mod_base = um
  modified_base 4: mod_base = cm
  modified_base 5: mod_base = OTHER; note = 2'-O-methyladenosine
  modified_base 6: mod_base = cm
  modified_base 7: mod_base = OTHER; note = 2'-O-methyladenosine
  modified_base 8: mod_base = OTHER; note = 2'-O-methyladenosine
  modified_base 9: mod_base = OTHER; note = 2'-fluorocytidine
  modified_base 10: mod_base = cm
  modified_base 11: mod_base = OTHER; note = 2'-fluoroadenosine
  modified_base 12: mod_base = OTHER; note = 2'-O-methyladenosine
  modified_base 13: mod_base = OTHER; note = 2'-fluorouridine
  modified_base 14: mod_base = OTHER; note = 2'-O-methyladenosine
  modified_base 15: mod_base = OTHER; note = 2'-O-methyladenosine
  modified_base 16: mod_base = OTHER; note = 2'-O-methyladenosine
  modified_base 17: mod_base = um
  modified_base 18: mod_base = gm
  modified_base 19: mod_base = um
  modified_base 20: mod_base = cm
  modified_base 21: mod_base = um
  source 1..21: mol_type = other RNA
agtcacaaccaataaatgtct

SEQ ID NO: 795 - RNA, 21 nt, synthetic construct
  modified_base 1: mod_base = OTHER; note = 2'-O-methyladenosine
  modified_base 1^2: mod_base = OTHER; note = phosphorothioate linkage
  modified_base 2: mod_base = gm
  modified_base 3: mod_base = OTHER; note = 2'-O-methyladenosine
  modified_base 4: mod_base = gm
  modified_base 5: mod_base = cm
  modified_base 6: mod_base = cm
  modified_base 7: mod_base = um
  modified_base 8: mod_base = OTHER; note = 2'-O-methyladenosine
  modified_base 9: mod_base = OTHER; note = 2'-fluoroadenosine
  modified_base 10: mod_base = OTHER; note = 2'-fluorocytidine
  modified_base 11: mod_base = OTHER; note = 2'-fluorocytidine
  modified_base 12: mod_base = um
  modified_base 13: mod_base = um
  modified_base 14: mod_base = cm
  modified_base 15: mod_base = OTHER; note = 2'-O-methyladenosine
  modified_base 16: mod_base = OTHER; note = 2'-O-methyladenosine
  modified_base 17: mod_base = um
  modified_base 18: mod_base = cm
  modified_base 19: mod_base = um
  modified_base 20: mod_base = cm
  modified_base 21: mod_base = OTHER; note = 2'-O-methyladenosine
  source 1..21: mol_type = other RNA
agagcctaaccttcaatctca

SEQ ID NO: 796 - RNA, 21 nt, synthetic construct
  modified_base 1: mod_base = OTHER; note = 2'-O-methyladenosine
  modified_base 1^2: mod_base = OTHER; note = phosphorothioate linkage
  modified_base 2: mod_base = gm
  modified_base 3: mod_base = OTHER; note = 2'-O-methyladenosine
  modified_base 4: mod_base = gm
  modified_base 5: mod_base = cm
  modified_base 6: mod_base = cm
  modified_base 7: mod_base = um
  modified_base 8: mod_base = OTHER; note = 2'-O-methyladenosine
  modified_base 9: mod_base = OTHER; note = 2'-fluoroadenosine
  modified_base 10: mod_base = OTHER; note = 2'-fluorocytidine
  modified_base 11: mod_base = OTHER; note = 2'-fluorocytidine
  modified_base 12: mod_base = um
  modified_base 13: mod_base = um
  modified_base 14: mod_base = cm
  modified_base 15: mod_base = OTHER; note = 2'-O-methyladenosine
  modified_base 16: mod_base = OTHER; note = 2'-O-methyladenosine
  modified_base 17: mod_base = um
  modified_base 18: mod_base = cm
  modified_base 19: mod_base = cm
  modified_base 20: mod_base = cm
  modified_base 21: mod_base = OTHER; note = 2'-O-methyladenosine
  source 1..21: mol_type = other RNA
agagcctaaccttcaatccca

SEQ ID NO: 797 - RNA, 21 nt, synthetic construct
  modified_base 1: mod_base = gm
  modified_base 1^2: mod_base = OTHER; note = phosphorothioate linkage
  modified_base 2: mod_base = gm
  modified_base 3: mod_base = OTHER; note = 2'-O-methyladenosine
  modified_base 4: mod_base = OTHER; note = 2'-O-methyladenosine
  modified_base 5: mod_base = OTHER; note = 2'-O-methyladenosine
  modified_base 6: mod_base = cm
  modified_base 7: mod_base = um
  modified_base 8: mod_base = cm
  modified_base 9: mod_base = OTHER; note = adenosine
  modified_base 10: mod_base = gm
  modified_base 11: mod_base = OTHER; note = adenosine
  modified_base 12: mod_base = um
  modified_base 13: mod_base = OTHER; note = adenosine
  modified_base 14: mod_base = OTHER; note = 2'-O-methyladenosine
  modified_base 15: mod_base = OTHER; note = 2'-O-methyladenosine
  modified_base 16: mod_base = um
  modified_base 17: mod_base = gm
  modified_base 18: mod_base = cm
  modified_base 19: mod_base = um
  modified_base 20: mod_base = OTHER; note = 2'-O-methyladenosine
  modified_base 21: mod_base = OTHER; note = 2'-O-methyladenosine
  source 1..21: mol_type = other RNA
ggaaactcagataaatgctaa

SEQ ID NO: 798 - RNA, 19 nt, synthetic construct
  modified_base 1: mod_base = gm
  modified_base 1^2: mod_base = OTHER; note = phosphorothioate linkage
  modified_base 2: mod_base = OTHER; note = 2'-O-methyl-2-aminoadenosine
  modified_base 3: mod_base = OTHER; note = 2'-O-methyladenosine
  modified_base 4: mod_base = cm
  modified_base 5: mod_base = um
  modified_base 6: mod_base = cm
  modified_base 7: mod_base = OTHER; note = 2'-fluoroadenosine
  modified_base 8: mod_base = OTHER; note = 2'-fluoroguanosine
  modified_base 9: mod_base = OTHER; note = 2'-fluoroadenosine
  modified_base 10: mod_base = um
  modified_base 11: mod_base = OTHER; note = 2'-O-methyladenosine
  modified_base 12: mod_base = OTHER; note = 2'-O-methyladenosine
  modified_base 13: mod_base = OTHER; note = 2'-O-methyladenosine
  modified_base 14: mod_base = um
  modified_base 15: mod_base = gm
  modified_base 16: mod_base = cm
  modified_base 17: mod_base = um
  modified_base 18: mod_base = OTHER; note = 2'-O-methyladenosine
  modified_base 19: mod_base = OTHER; note = 2'-O-methyladenosine
  source 1..19: mol_type = other RNA
gnactcagataaatgctaa

SEQ ID NO: 799 - RNA, 21 nt, synthetic construct
  modified_base 1: mod_base = OTHER; note = 2'-O-methyladenosine
  modified_base 1^2: mod_base = OTHER; note = phosphorothioate linkage
  modified_base 2: mod_base = gm
  modified_base 3: mod_base = um
  modified_base 4: mod_base = cm
  modified_base 5: mod_base = OTHER; note = 2'-O-methyladenosine
  modified_base 6: mod_base = cm
  modified_base 7: mod_base = OTHER; note = 2'-fluoroadenosine
  modified_base 8: mod_base = OTHER; note = 2'-O-methyladenosine
  modified_base 9: mod_base = OTHER; note = 2'-fluorocytidine
  modified_base 10: mod_base = cm
  modified_base 11: mod_base = OTHER; note = 2'-fluoroadenosine
  modified_base 12: mod_base = OTHER; note = 2'-O-methyladenosine
  modified_base 13: mod_base = um
  modified_base 14: mod_base = OTHER; note = 2'-O-methyladenosine
  modified_base 15: mod_base = OTHER; note = 2'-O-methyladenosine
  modified_base 16: mod_base = OTHER; note = 2'-O-methyladenosine
  modified_base 17: mod_base = um
  modified_base 18: mod_base = gm
  modified_base 19: mod_base = um
  modified_base 20: mod_base = cm
  modified_base 21: mod_base = um
  source 1..21: mol_type = other RNA
agtcacaaccaataaatgtct

SEQ ID NO: 800 - RNA, 21 nt, synthetic construct
  modified_base 1: mod_base = gm
  modified_base 1^2: mod_base = OTHER; note = phosphorothioate linkage
  modified_base 2: mod_base = gm
  modified_base 3: mod_base = um
  modified_base 4: mod_base = cm
  modified_base 5: mod_base = OTHER; note = 2'-O-methyladenosine
  modified_base 6: mod_base = cm
  modified_base 7: mod_base = OTHER; note = 2'-O-methyladenosine
  modified_base 8: mod_base = OTHER; note = 2'-O-methyladenosine
  modified_base 9: mod_base = OTHER; note = 2'-fluorocytidine
  modified_base 10: mod_base = OTHER; note = 2'-fluorocytidine
  modified_base 11: mod_base = OTHER; note = 2'-fluoroadenosine
  modified_base 12: mod_base = OTHER; note = 2'-O-methyladenosine
  modified_base 13: mod_base = um
  modified_base 14: mod_base = OTHER; note = 2'-O-methyladenosine
  modified_base 15: mod_base = OTHER; note = 2'-O-methyladenosine
  modified_base 16: mod_base = OTHER; note = 2'-O-methyladenosine
  modified_base 17: mod_base = um
  modified_base 18: mod_base = gm
  modified_base 19: mod_base = um
  modified_base 20: mod_base = cm
  modified_base 21: mod_base = um
  source 1..21: mol_type = other RNA
ggtcacaaccaataaatgtct

SEQ ID NO: 801 - RNA, 21 nt, synthetic construct
  modified_base 1: mod_base = gm
  modified_base 1^2: mod_base = OTHER; note = phosphorothioate linkage
  modified_base 2: mod_base = gm
  modified_base 3: mod_base = um
  modified_base 4: mod_base = cm
  modified_base 5: mod_base = OTHER; note = 2'-O-methyladenosine
  modified_base 6: mod_base = cm
  modified_base 7: mod_base = OTHER; note = 2'-O-methyladenosine
  modified_base 8: mod_base = OTHER; note = 2'-O-methyladenosine
  modified_base 9: mod_base = OTHER; note = 2'-fluorocytidine
  modified_base 10: mod_base = OTHER; note = 2'-fluorocytidine
  modified_base 11: mod_base = OTHER; note = 2'-fluoroadenosine
  modified_base 12: mod_base = OTHER; note = 2'-O-methyladenosine
  modified_base 13: mod_base = um
  modified_base 14: mod_base = OTHER; note = 2'-O-methyladenosine
  modified_base 15: mod_base = OTHER; note = 2'-O-methyladenosine
  modified_base 16: mod_base = OTHER; note = 2'-O-methyladenosine
  modified_base 17: mod_base = um
  modified_base 18: mod_base = gm
  modified_base 19: mod_base = um
  modified_base 20: mod_base = cm
  modified_base 21: mod_base = OTHER; note = 2'-O-methyladenosine
  source 1..21: mol_type = other RNA
ggtcacaaccaataaatgtca

SEQ ID NO: 802 - RNA, 21 nt, synthetic construct
  modified_base 1: mod_base = OTHER; note = 2'-O-methyladenosine
  modified_base 1^2: mod_base = OTHER; note = phosphorothioate linkage
  modified_base 2: mod_base = gm
  modified_base 3: mod_base = um
  modified_base 4: mod_base = cm
  modified_base 5: mod_base = OTHER; note = 2'-O-methyladenosine
  modified_base 6: mod_base = cm
  modified_base 7: mod_base = OTHER; note = 2'-O-methyladenosine
  modified_base 8: mod_base = OTHER; note = 2'-O-methyladenosine
  modified_base 9: mod_base = OTHER; note = 2'-fluorocytidine
  modified_base 10: mod_base = OTHER; note = 2'-fluorocytidine
  modified_base 11: mod_base = OTHER; note = 2'-fluoroadenosine
  modified_base 12: mod_base = OTHER; note = 2'-O-methyladenosine
  modified_base 13: mod_base = um
  modified_base 14: mod_base = OTHER; note = 2'-O-methyladenosine
  modified_base 15: mod_base = OTHER; note = 2'-O-methyladenosine
  modified_base 16: mod_base = OTHER; note = 2'-O-methyladenosine
  modified_base 17: mod_base = um
  modified_base 18: mod_base = gm
  modified_base 19: mod_base = um
  modified_base 20: mod_base = cm
  modified_base 21: mod_base = OTHER; note = 2'-O-methyladenosine
  source 1..21: mol_type = other RNA
agtcacaaccaataaatgtca

SEQ ID NO: 803 - RNA, 21 nt, synthetic construct
  modified_base 1: mod_base = OTHER; note = 2'-O-methyl-2-aminoadenosine
  modified_base 1^2: mod_base = OTHER; note = phosphorothioate linkage
  modified_base 2: mod_base = OTHER; note = 2'-O-methyladenosine
  modified_base 3: mod_base = gm
  modified_base 4: mod_base = um
  modified_base 5: mod_base = cm
  modified_base 6: mod_base = OTHER; note = 2'-O-methyladenosine
  modified_base 7: mod_base = cm
  modified_base 8: mod_base = OTHER; note = 2'-O-methyladenosine
  modified_base 9: mod_base = OTHER; note = 2'-fluoroadenosine
  modified_base 10: mod_base = cm
  modified_base 11: mod_base = OTHER; note = 2'-fluorocytidine
  modified_base 12: mod_base = OTHER; note = 2'-O-methyladenosine
  modified_base 13: mod_base = OTHER; note = 2'-fluoroadenosine
  modified_base 14: mod_base = um
  modified_base 15: mod_base = OTHER; note = 2'-O-methyladenosine
  modified_base 16: mod_base = OTHER; note = 2'-O-methyladenosine
  modified_base 17: mod_base = OTHER; note = 2'-O-methyladenosine
  modified_base 18: mod_base = um
  modified_base 19: mod_base = gm
  modified_base 20: mod_base = um
  modified_base 21: mod_base = OTHER; note = 2'-O-methyladenosine
  source 1..21: mol_type = other RNA
nagtcacaaccaataaatgta

SEQ ID NO: 804 - RNA, 21 nt, synthetic construct
  modified_base 1: mod_base = gm
  modified_base 1^2: mod_base = OTHER; note = phosphorothioate linkage
  modified_base 2: mod_base = OTHER; note = 2'-O-methyladenosine
  modified_base 3: mod_base = gm
  modified_base 4: mod_base = um
  modified_base 5: mod_base = cm
  modified_base 6: mod_base = OTHER; note = 2'-O-methyladenosine
  modified_base 7: mod_base = cm
  modified_base 8: mod_base = OTHER; note = 2'-O-methyladenosine
  modified_base 9: mod_base = OTHER; note = 2'-fluoroadenosine
  modified_base 10: mod_base = OTHER; note = 2'-fluorocytidine
  modified_base 11: mod_base = OTHER; note = 2'-fluorocytidine
  modified_base 12: mod_base = OTHER; note = 2'-O-methyladenosine
  modified_base 13: mod_base = OTHER; note = 2'-O-methyladenosine
  modified_base 14: mod_base = um
  modified_base 15: mod_base = OTHER; note = 2'-O-methyladenosine
  modified_base 16: mod_base = OTHER; note = 2'-O-methyladenosine
  modified_base 17: mod_base = OTHER; note = 2'-O-methyladenosine
  modified_base 18: mod_base = um
  modified_base 19: mod_base = gm
  modified_base 20: mod_base = um
  modified_base 21: mod_base = OTHER; note = 2'-O-methyladenosine
  source 1..21: mol_type = other RNA
gagtcacaaccaataaatgta

SEQ ID NO: 805 - RNA, 21 nt, synthetic construct
  modified_base 1: mod_base = OTHER; note = 2'-O-methyladenosine
  modified_base 1^2: mod_base = OTHER; note = phosphorothioate linkage
  modified_base 2: mod_base = gm
  modified_base 3: mod_base = um
  modified_base 4: mod_base = cm
  modified_base 5: mod_base = OTHER; note = 2'-O-methyladenosine
  modified_base 6: mod_base = cm
  modified_base 7: mod_base = OTHER; note = 2'-O-methyladenosine
  modified_base 8: mod_base = OTHER; note = 2'-O-methyladenosine
  modified_base 9: mod_base = OTHER; note = 2'-fluorocytidine
  modified_base 10: mod_base = OTHER; note = 2'-fluorocytidine
  modified_base 11: mod_base = OTHER; note = 2'-fluoroadenosine
  modified_base 12: mod_base = OTHER; note = 2'-O-methyladenosine
  modified_base 13: mod_base = um
  modified_base 14: mod_base = OTHER; note = 2'-O-methyladenosine
  modified_base 15: mod_base = OTHER; note = 2'-O-methyladenosine
  modified_base 16: mod_base = OTHER; note = 2'-O-methyladenosine
  modified_base 17: mod_base = um
  modified_base 18: mod_base = gm
  modified_base 19: mod_base = um
  modified_base 20: mod_base = cm
  modified_base 21: mod_base = cm
  source 1..21: mol_type = other RNA
agtcacaaccaataaatgtcc

SEQ ID NO: 806 - RNA, 21 nt, synthetic construct
  modified_base 1: mod_base = OTHER; note = 2'-O-methyladenosine
  modified_base 1^2: mod_base = OTHER; note = phosphorothioate linkage
  modified_base 2: mod_base = OTHER; note = 2'-O-methyladenosine
  modified_base 3: mod_base = gm
  modified_base 4: mod_base = gm
  modified_base 5: mod_base = cm
  modified_base 6: mod_base = um
  modified_base 7: mod_base = gm
  modified_base 8: mod_base = cm
  modified_base 9: mod_base = OTHER; note = 2'-fluorocytidine
  modified_base 10: mod_base = OTHER; note = 2'-fluorouridine
  modified_base 11: mod_base = OTHER; note = 2'-fluorouridine
  modified_base 12: mod_base = OTHER; note = 2'-O-methyladenosine
  modified_base 13: mod_base = gm
  modified_base 14: mod_base = cm
  modified_base 15: mod_base = um
  modified_base 16: mod_base = OTHER; note = 2'-O-methyladenosine
  modified_base 17: mod_base = um
  modified_base 18: mod_base = cm
  modified_base 19: mod_base = um
  modified_base 20: mod_base = gm
  modified_base 21: mod_base = OTHER; note = 2'-O-methyladenosine
  source 1..21: mol_type = other RNA
aaggctgccttagctatctga

SEQ ID NO: 807 - RNA, 21 nt, synthetic construct
  modified_base 1: mod_base = cm
  modified_base 1^2: mod_base = OTHER; note = phosphorothioate linkage
  modified_base 2: mod_base = gm
  modified_base 3: mod_base = cm
  modified_base 4: mod_base = um
  modified_base 5: mod_base = um
  modified_base 6: mod_base = cm
  modified_base 7: mod_base = OTHER; note = 2'-O-methyladenosine
  modified_base 8: mod_base = OTHER; note = 2'-O-methyladenosine
  modified_base 9: mod_base = OTHER; note = 2'-fluorouridine
  modified_base 10: mod_base = OTHER; note = 2'-fluorocytidine
  modified_base 11: mod_base = OTHER; note = 2'-fluoroguanosine
  modified_base 12: mod_base = OTHER; note = 2'-O-methyladenosine
  modified_base 13: mod_base = cm
  modified_base 14: mod_base = cm
  modified_base 15: mod_base = um
  modified_base 16: mod_base = um
  modified_base 17: mod_base = um
  modified_base 18: mod_base = OTHER; note = 2'-O-methyladenosine
  modified_base 19: mod_base = cm
  modified_base 20: mod_base = um
  modified_base 21: mod_base = OTHER; note = 2'-O-methyladenosine
  source 1..21: mol_type = other RNA
cgcttcaatcgacctttacta

SEQ ID NO: 808 - RNA, 21 nt, synthetic construct
  modified_base 1: mod_base = gm
  modified_base 1^2: mod_base = OTHER; note = phosphorothioate linkage
  modified_base 2: mod_base = OTHER; note = 2'-O-methyl-2-aminoadenosine
  modified_base 3: mod_base = OTHER; note = 2'-O-methyladenosine
  modified_base 4: mod_base = OTHER; note = 2'-O-methyladenosine
  modified_base 5: mod_base = cm
  modified_base 6: mod_base = OTHER; note = 2'-O-methyladenosine
  modified_base 7: mod_base = um
  modified_base 8: mod_base = um
  modified_base 9: mod_base = OTHER; note = 2'-fluoroadenosine
  modified_base 10: mod_base = OTHER; note = 2'-fluoroadenosine
  modified_base 11: mod_base = OTHER; note = 2'-fluorocytidine
  modified_base 12: mod_base = um
  modified_base 13: mod_base = cm
  modified_base 14: mod_base = um
  modified_base 15: mod_base = OTHER; note = 2'-O-methyladenosine
  modified_base 16: mod_base = OTHER; note = 2'-O-methyladenosine
  modified_base 17: mod_base = cm
  modified_base 18: mod_base = um
  modified_base 19: mod_base = gm
  modified_base 20: mod_base = um
  modified_base 21: mod_base = OTHER; note = 2'-O-methyladenosine
  source 1..21: mol_type = other RNA
gnaacattaactctaactgta

SEQ ID NO: 809 - RNA, 21 nt, synthetic construct
  modified_base 1: mod_base = OTHER; note = 2'-O-methyl-2-aminoadenosine
  modified_base 1^2: mod_base = OTHER; note = phosphorothioate linkage
  modified_base 2: mod_base = cm
  modified_base 3: mod_base = OTHER; note = 2'-O-methyladenosine
  modified_base 4: mod_base = gm
  modified_base 5: mod_base = OTHER; note = 2'-O-methyladenosine
  modified_base 6: mod_base = OTHER; note = 2'-O-methyladenosine
  modified_base 7: mod_base = gm
  modified_base 8: mod_base = OTHER; note = 2'-O-methyladenosine
  modified_base 9: mod_base = OTHER; note = 2'-fluoroguanosine
  modified_base 10: mod_base = OTHER; note = 2'-fluorouridine
  modified_base 11: mod_base = OTHER; note = 2'-fluorouridine
  modified_base 12: mod_base = um
  modified_base 13: mod_base = cm
  modified_base 14: mod_base = um
  modified_base 15: mod_base = um
  modified_base 16: mod_base = OTHER; note = 2'-O-methyladenosine
  modified_base 17: mod_base = OTHER; note = 2'-O-methyladenosine
  modified_base 18: mod_base = cm
  modified_base 19: mod_base = um
  modified_base 20: mod_base = um
  modified_base 21: mod_base = OTHER; note = 2'-O-methyladenosine
  source 1..21: mol_type = other RNA
ncagaagagtttcttaactta

SEQ ID NO: 810 - RNA, 21 nt, synthetic construct
  modified_base 1: mod_base = gm
  modified_base 1^2: mod_base = OTHER; note = phosphorothioate linkage
  modified_base 2: mod_base = um
  modified_base 3: mod_base = OTHER; note = 2'-O-methyladenosine
  modified_base 4: mod_base = cm
  modified_base 5: mod_base = um
  modified_base 6: mod_base = OTHER; note = 2'-O-methyladenosine
  modified_base 7: mod_base = cm
  modified_base 8: mod_base = um
  modified_base 9: mod_base = OTHER; note = 2'-fluorocytidine
  modified_base 10: mod_base = OTHER; note = 2'-fluorocytidine
  modified_base 11: mod_base = OTHER; note = 2'-fluorouridine
  modified_base 12: mod_base = cm
  modified_base 13: mod_base = OTHER; note = 2'-O-methyladenosine
  modified_base 14: mod_base = OTHER; note = 2'-O-methyladenosine
  modified_base 15: mod_base = OTHER; note = 2'-O-methyladenosine
  modified_base 16: mod_base = um
  modified_base 17: mod_base = gm
  modified_base 18: mod_base = um
  modified_base 19: mod_base = um
  modified_base 20: mod_base = gm
  modified_base 21: mod_base = OTHER; note = 2'-O-methyladenosine
  source 1..21: mol_type = other RNA
gtactactcctcaaatgttga

SEQ ID NO: 811 - RNA, 21 nt, synthetic construct
  modified_base 1: mod_base = cm
  modified_base 1^2: mod_base = OTHER; note = phosphorothioate linkage
  modified_base 2: mod_base = um
  modified_base 3: mod_base = um
  modified_base 4: mod_base = cm
  modified_base 5: mod_base = cm
  modified_base 6: mod_base = OTHER; note = 2'-O-methyladenosine
  modified_base 7: mod_base = um
  modified_base 8: mod_base = OTHER; note = 2'-O-methyladenosine
  modified_base 9: mod_base = OTHER; note = 2'-fluoroadenosine
  modified_base 10: mod_base = OTHER; note = 2'-fluorocytidine
  modified_base 11: mod_base = OTHER; note = 2'-fluoroadenosine
  modified_base 12: mod_base = um
  modified_base 13: mod_base = um
  modified_base 14: mod_base = gm
  modified_base 15: mod_base = OTHER; note = 2'-O-methyladenosine
  modified_base 16: mod_base = um
  modified_base 17: mod_base = gm
  modified_base 18: mod_base = OTHER; note = 2'-O-methyladenosine
  modified_base 19: mod_base = cm
  modified_base 20: mod_base = um
  modified_base 21: mod_base = OTHER; note = 2'-O-methyladenosine
  source 1..21: mol_type = other RNA
cttccataacattgatgacta

SEQ ID NO: 812 - RNA, 21 nt, synthetic construct
  modified_base 1: mod_base = gm
  modified_base 1^2: mod_base = OTHER; note = phosphorothioate linkage
  modified_base 2: mod_base = cm
  modified_base 3: mod_base = OTHER; note = 2'-O-methyladenosine
  modified_base 4: mod_base = OTHER; note = 2'-O-methyladenosine
  modified_base 5: mod_base = um
  modified_base 6: mod_base = gm
  modified_base 7: mod_base = OTHER; note = 2'-O-methyladenosine
  modified_base 8: mod_base = um
  modified_base 9: mod_base = OTHER; note = 2'-fluoroadenosine
  modified_base 10: mod_base = OTHER; note = 2'-fluoroguanosine
  modified_base 11: mod_base = OTHER; note = 2'-fluorocytidine
  modified_base 12: mod_base = OTHER; note = 2'-O-methyladenosine
  modified_base 13: mod_base = cm
  modified_base 14: mod_base = cm
  modified_base 15: mod_base = um
  modified_base 16: mod_base = OTHER; note = 2'-O-methyladenosine
  modified_base 17: mod_base = OTHER; note = 2'-O-methyladenosine
  modified_base 18: mod_base = OTHER; note = 2'-O-methyladenosine
  modified_base 19: mod_base = cm
  modified_base 20: mod_base = um
  modified_base 21: mod_base = um
  source 1..21: mol_type = other RNA
gcaatgatagcacctaaactt

SEQ ID NO: 813 - RNA, 21 nt, synthetic construct
  modified_base 1: mod_base = OTHER; note = 2'-O-methyl-2-aminoadenosine
  modified_base 1^2: mod_base = OTHER; note = phosphorothioate linkage
  modified_base 2: mod_base = OTHER; note = 2'-O-methyladenosine
  modified_base 3: mod_base = gm
  modified_base 4: mod_base = OTHER; note = 2'-O-methyladenosine
  modified_base 5: mod_base = cm
  modified_base 6: mod_base = OTHER; note = 2'-O-methyladenosine
  modified_base 7: mod_base = gm
  modified_base 8: mod_base = OTHER; note = 2'-O-methyladenosine
  modified_base 9: mod_base = OTHER; note = 2'-fluorocytidine
  modified_base 10: mod_base = OTHER; note = 2'-fluoroadenosine
  modified_base 11: mod_base = OTHER; note = 2'-fluorouridine
  modified_base 12: mod_base = um
  modified_base 13: mod_base = cm
  modified_base 14: mod_base = cm
  modified_base 15: mod_base = um
  modified_base 16: mod_base = um
  modified_base 17: mod_base = cm
  modified_base 18: mod_base = um
  modified_base 19: mod_base = OTHER; note = 2'-O-methyladenosine
  modified_base 20: mod_base = cm
  modified_base 21: mod_base = OTHER; note = 2'-O-methyladenosine
  source 1..21: mol_type = other RNA
nagacagacattccttctaca

SEQ ID NO: 814 - RNA, 21 nt, synthetic construct
  modified_base 1: mod_base = cm
  modified_base 1^2: mod_base = OTHER; note = phosphorothioate linkage
  modified_base 2: mod_base = OTHER; note = 2'-O-methyl-2-aminoadenosine
  modified_base 3: mod_base = um
  modified_base 4: mod_base = gm
  modified_base 5: mod_base = um
  modified_base 6: mod_base = OTHER; note = 2'-O-methyladenosine
  modified_base 7: mod_base = OTHER; note = 2'-O-methyladenosine
  modified_base 8: mod_base = um
  modified_base 9: mod_base = OTHER; note = 2'-fluoroguanosine
  modified_base 10: mod_base = OTHER; note = 2'-fluoroadenosine
  modified_base 11: mod_base = OTHER; note = 2'-fluorocytidine
  modified_base 12: mod_base = OTHER; note = 2'-O-methyladenosine
  modified_base 13: mod_base = cm
  modified_base 14: mod_base = um
  modified_base 15: mod_base = um
  modified_base 16: mod_base = cm
  modified_base 17: mod_base = um
  modified_base 18: mod_base = um
  modified_base 19: mod_base = gm
  modified_base 20: mod_base = um
  modified_base 21: mod_base = OTHER; note = 2'-O-methyladenosine
  source 1..21: mol_type = other RNA
cntgtaatgacacttcttgta

SEQ ID NO: 815 - RNA, 21 nt, synthetic construct
  modified_base 1: mod_base = OTHER; note = 2'-O-methyl-2-aminoadenosine
  modified_base 1^2: mod_base = OTHER; note = phosphorothioate linkage
  modified_base 2: mod_base = um
  modified_base 3: mod_base = OTHER; note = 2'-O-methyladenosine
  modified_base 4: mod_base = cm
  modified_base 5: mod_base = OTHER; note = 2'-O-methyladenosine
  modified_base 6: mod_base = OTHER; note = 2'-O-methyladenosine
  modified_base 7: mod_base = gm
  modified_base 8: mod_base = um
  modified_base 9: mod_base = OTHER; note = 2'-fluoroadenosine
  modified_base 10: mod_base = OTHER; note = 2'-fluoroguanosine
  modified_base 11: mod_base = OTHER; note = 2'-fluoroadenosine
  modified_base 12: mod_base = um
  modified_base 13: mod_base = cm
  modified_base 14: mod_base = cm
  modified_base 15: mod_base = um
  modified_base 16: mod_base = gm
  modified_base 17: mod_base = OTHER; note = 2'-O-methyladenosine
  modified_base 18: mod_base = gm
  modified_base 19: mod_base = OTHER; note = 2'-O-methyladenosine
  modified_base 20: mod_base = OTHER; note = 2'-O-methyladenosine
  modified_base 21: mod_base = OTHER; note = 2'-O-methyladenosine
  source 1..21: mol_type = other RNA
ntacaagtagatcctgagaaa

SEQ ID NO: 816 - RNA, 21 nt, synthetic construct
  modified_base 1: mod_base = gm
  modified_base 1^2: mod_base = OTHER; note = phosphorothioate linkage
  modified_base 2: mod_base = gm
  modified_base 3: mod_base = um
  modified_base 4: mod_base = cm
  modified_base 5: mod_base = OTHER; note = 2'-O-methyladenosine
  modified_base 6: mod_base = cm
  modified_base 7: mod_base = OTHER; note = 2'-O-methyladenosine
  modified_base 8: mod_base = OTHER; note = 2'-O-methyladenosine
  modified_base 9: mod_base = OTHER; note = 2'-fluorocytidine
  modified_base 10: mod_base = OTHER; note = 2'-fluorocytidine
  modified_base 11: mod_base = OTHER; note = 2'-fluoroadenosine
  modified_base 12: mod_base = OTHER; note = 2'-O-methyladenosine
  modified_base 13: mod_base = cm
  modified_base 14: mod_base = OTHER; note = 2'-O-methyladenosine
  modified_base 15: mod_base = OTHER; note = 2'-O-methyladenosine
  modified_base 16: mod_base = OTHER; note = 2'-O-methyladenosine
  modified_base 17: mod_base = um
  modified_base 18: mod_base = gm
  modified_base 19: mod_base = um
  modified_base 20: mod_base = cm
  modified_base 21: mod_base = um
  source 1..21: mol_type = other RNA
ggtcacaaccaacaaatgtct

SEQ ID NO: 817 - RNA, 21 nt, synthetic construct
  modified_base 1: mod_base = gm
  modified_base 1^2: mod_base = OTHER; note = phosphorothioate linkage
  modified_base 2: mod_base = gm
  modified_base 3: mod_base = um
  modified_base 4: mod_base = cm
  modified_base 5: mod_base = OTHER; note = 2'-O-methyladenosine
  modified_base 6: mod_base = cm
  modified_base 7: mod_base = OTHER; note = 2'-O-methyladenosine
  modified_base 8: mod_base = OTHER; note = 2'-O-methyladenosine
  modified_base 9: mod_base = OTHER; note = 2'-fluorocytidine
  modified_base 10: mod_base = OTHER; note = 2'-fluorocytidine
  modified_base 11: mod_base = OTHER; note = 2'-fluoroadenosine
  modified_base 12: mod_base = OTHER; note = 2'-O-methyladenosine
  modified_base 13: mod_base = um
  modified_base 14: mod_base = OTHER; note = 2'-O-methyladenosine
  modified_base 15: mod_base = OTHER; note = 2'-O-methyladenosine
  modified_base 16: mod_base = OTHER; note = 2'-O-methyladenosine
  modified_base 17: mod_base = cm
  modified_base 18: mod_base = gm
  modified_base 19: mod_base = um
  modified_base 20: mod_base = cm
  modified_base 21: mod_base = um
  source 1..21: mol_type = other RNA
ggtcacaaccaataaacgtct

SEQ ID NO: 818 - RNA, 21 nt, synthetic construct
  modified_base 1: mod_base = gm
  modified_base 1^2: mod_base = OTHER; note = phosphorothioate linkage
  modified_base 2: mod_base = gm
  modified_base 3: mod_base = um
  modified_base 4: mod_base = cm
  modified_base 5: mod_base = OTHER; note = 2'-O-methyladenosine
  modified_base 6: mod_base = cm
  modified_base 7: mod_base = OTHER; note = 2'-O-methyladenosine
  modified_base 8: mod_base = OTHER; note = 2'-O-methyladenosine
  modified_base 9: mod_base = OTHER; note = 2'-fluorocytidine
  modified_base 10: mod_base = OTHER; note = 2'-fluorocytidine
  modified_base 11: mod_base = OTHER; note = 2'-fluoroadenosine
  modified_base 12: mod_base = OTHER; note = 2'-O-methyladenosine
  modified_base 13: mod_base = um
  modified_base 14: mod_base = OTHER; note = 2'-O-methyladenosine
  modified_base 15: mod_base = OTHER; note = 2'-O-methyladenosine
  modified_base 16: mod_base = OTHER; note = 2'-O-methyladenosine
  modified_base 17: mod_base = um
  modified_base 18: mod_base = gm
  modified_base 19: mod_base = um
  modified_base 20: mod_base = cm
  modified_base 21: mod_base = cm
  source 1..21: mol_type = other RNA
ggtcacaaccaataaatgtcc

SEQ ID NO: 819 - RNA, 21 nt, synthetic construct
  modified_base 1: mod_base = gm
  modified_base 1^2: mod_base = OTHER; note = phosphorothioate linkage
  modified_base 2: mod_base = gm
  modified_base 3: mod_base = um
  modified_base 4: mod_base = cm
  modified_base 5: mod_base = OTHER; note = 2'-O-methyladenosine
  modified_base 6: mod_base = cm
  modified_base 7: mod_base = OTHER; note = 2'-O-methyladenosine
  modified_base 8: mod_base = OTHER; note = 2'-O-methyladenosine
  modified_base 9: mod_base = OTHER; note = 2'-fluorocytidine
  modified_base 10: mod_base = OTHER; note = 2'-fluorocytidine
  modified_base 11: mod_base = OTHER; note = 2'-fluoroadenosine
  modified_base 12: mod_base = OTHER; note = 2'-O-methyladenosine
  modified_base 13: mod_base = um
  modified_base 14: mod_base = OTHER; note = 2'-O-methyladenosine
  modified_base 15: mod_base = OTHER; note = 2'-O-methyladenosine
  modified_base 16: mod_base = OTHER; note = 2'-O-methyladenosine
  modified_base 17: mod_base = cm
  modified_base 18: mod_base = gm
  modified_base 19: mod_base = um
  modified_base 20: mod_base = cm
  modified_base 21: mod_base = cm
  source 1..21: mol_type = other RNA
ggtcacaaccaataaacgtcc

SEQ ID NO: 820 - RNA, 21 nt, synthetic construct
  modified_base 1: mod_base = OTHER; note = 2'-O-methyladenosine
  modified_base 1^2: mod_base = OTHER; note = phosphorothioate linkage
  modified_base 2: mod_base = gm
  modified_base 3: mod_base = um
  modified_base 4: mod_base = cm
  modified_base 5: mod_base = OTHER; note = 2'-O-methyladenosine
  modified_base 6: mod_base = cm
  modified_base 7: mod_base = OTHER; note = 2'-O-methyladenosine
  modified_base 8: mod_base = OTHER; note = 2'-O-methyladenosine
  modified_base 9: mod_base = OTHER; note = 2'-fluorocytidine
  modified_base 10: mod_base = OTHER; note = 2'-fluorocytidine
  modified_base 11: mod_base = OTHER; note = 2'-fluoroadenosine
  modified_base 12: mod_base = OTHER; note = 2'-O-methyladenosine
  modified_base 13: mod_base = cm
  modified_base 14: mod_base = OTHER; note = 2'-O-methyladenosine
  modified_base 15: mod_base = OTHER; note = 2'-O-methyladenosine
  modified_base 16: mod_base = OTHER; note = 2'-O-methyladenosine
  modified_base 17: mod_base = um
  modified_base 18: mod_base = gm
  modified_base 19: mod_base = um
  modified_base 20: mod_base = cm
  modified_base 21: mod_base = um
  source 1..21: mol_type = other RNA
agtcacaaccaacaaatgtct

SEQ ID NO: 821 - RNA, 21 nt, synthetic construct
  modified_base 1: mod_base = gm
  modified_base 1^2: mod_base = OTHER; note = phosphorothioate linkage
  modified_base 2: mod_base = gm
  modified_base 3: mod_base = um
  modified_base 4: mod_base = cm
  modified_base 5: mod_base = OTHER; note = 2'-O-methyladenosine
  modified_base 6: mod_base = cm
  modified_base 7: mod_base = OTHER; note = 2'-O-methyladenosine
  modified_base 8: mod_base = OTHER; note = 2'-O-methyladenosine
  modified_base 9: mod_base = OTHER; note = 2'-fluorocytidine
  modified_base 10: mod_base = OTHER; note = 2'-fluorocytidine
  modified_base 11: mod_base = OTHER; note = 2'-fluoroadenosine
  modified_base 12: mod_base = OTHER; note = 2'-O-methyladenosine
  modified_base 13: mod_base = cm
  modified_base 14: mod_base = OTHER; note = 2'-O-methyladenosine
  modified_base 15: mod_base = OTHER; note = 2'-O-methyladenosine
  modified_base 16: mod_base = OTHER; note = 2'-O-methyladenosine
  modified_base 17: mod_base = um
  modified_base 18: mod_base = gm
  modified_base 19: mod_base = um
  modified_base 20: mod_base = cm
  modified_base 21: mod_base = OTHER; note = 2'-O-methyladenosine
  source 1..21: mol_type = other RNA
ggtcacaaccaacaaatgtca

SEQ ID NO: 822 - RNA, 21 nt, synthetic construct
  modified_base 1: mod_base = OTHER; note = 2'-O-methyladenosine
  modified_base 1^2: mod_base = OTHER; note = phosphorothioate linkage
  modified_base 2: mod_base = gm
  modified_base 3: mod_base = um
  modified_base 4: mod_base = cm
  modified_base 5: mod_base = OTHER; note = 2'-O-methyladenosine
  modified_base 6: mod_base = cm
  modified_base 7: mod_base = OTHER; note = 2'-O-methyladenosine
  modified_base 8: mod_base = OTHER; note = 2'-O-methyladenosine
  modified_base 9: mod_base = OTHER; note = 2'-fluorocytidine
  modified_base 10: mod_base = OTHER; note = 2'-fluorocytidine
  modified_base 11: mod_base = OTHER; note = 2'-fluoroadenosine
  modified_base 12: mod_base = OTHER; note = 2'-O-methyladenosine
  modified_base 13: mod_base = um
  modified_base 14: mod_base = OTHER; note = 2'-O-methyladenosine
  modified_base 15: mod_base = OTHER; note = 2'-O-methyladenosine
  modified_base 16: mod_base = OTHER; note = 2'-O-methyladenosine
  modified_base 17: mod_base = cm
  modified_base 18: mod_base = gm
  modified_base 19: mod_base = um
  modified_base 20: mod_base = cm
  modified_base 21: mod_base = um
  source 1..21: mol_type = other RNA
agtcacaaccaataaacgtct

SEQ ID NO: 823 - RNA, 21 nt, synthetic construct
  source 1..21: mol_type = other RNA
agaatttgtgaggtttgattc

SEQ ID NO: 824 - RNA, 21 nt, synthetic construct
  source 1..21: mol_type = other RNA
taccatttctctcagtttcag

SEQ ID NO: 825 - RNA, 21 nt, synthetic construct
  source 1..21: mol_type = other RNA
ttagcatttatctgagtttcc

SEQ ID NO: 826 - RNA, 21 nt, synthetic construct
  source 1..21: mol_type = other RNA
tacatttattggttgtgactt

SEQ ID NO: 827 - RNA, 21 nt, synthetic construct
  source 1..21: mol_type = other RNA
ttggatttcagtaaggcaatg

SEQ ID NO: 828 - RNA, 21 nt, synthetic construct
  source 1..21: mol_type = other RNA
taaggttaggctctggatttc

SEQ ID NO: 829 - RNA, 21 nt, synthetic construct
  source 1..21: mol_type = other RNA
atttatctgagtttccgaatc

SEQ ID NO: 830 - RNA, 21 nt, synthetic construct
  source 1..21: mol_type = other RNA
agacatttattggttgtgact

SEQ ID NO: 831 - RNA, 21 nt, synthetic construct
  source 1..21: mol_type = other RNA
tatttattggttgtgactttc

SEQ ID NO: 832 - RNA, 21 nt, synthetic construct
  source 1..21: mol_type = other RNA
attgaaggttaggctctggat

SEQ ID NO: 833 - RNA, 21 nt, synthetic construct
  source 1..21: mol_type = other RNA
tttaggctctggatttcagta

SEQ ID NO: 834 - RNA, 21 nt, synthetic construct
  source 1..21: mol_type = other RNA
tgggattgaaggttaggctct

SEQ ID NO: 835 - RNA, 19 nt, synthetic construct
  source 1..19: mol_type = other RNA
ttagcatttatctgagttc

SEQ ID NO: 836 - RNA, 21 nt, synthetic construct
  source 1..21: mol_type = other RNA
agacatttattggttgtgacc

SEQ ID NO: 837 - RNA, 21 nt, synthetic construct
  source 1..21: mol_type = other RNA
tgacatttattggttgtgacc

SEQ ID NO: 838 - RNA, 21 nt, synthetic construct
  source 1..21: mol_type = other RNA
tgacatttattggttgtgact

SEQ ID NO: 839 - RNA, 21 nt, synthetic construct
  source 1..21: mol_type = other RNA
tacatttattggttgtgactc

SEQ ID NO: 840 - RNA, 21 nt, synthetic construct
  modified_base 1: mod_base = i
  source 1..21: mol_type = other RNA
ngacatttattggttgtgact

SEQ ID NO: 841 - RNA, 21 nt, synthetic construct
  source 1..21: mol_type = other RNA
agacgtttattggttgtgact

SEQ ID NO: 842 - RNA, 21 nt, synthetic construct
  source 1..21: mol_type = other RNA
tcagatagctaaggcagcctt

SEQ ID NO: 843 - RNA, 21 nt, synthetic construct
  source 1..21: mol_type = other RNA
tagtaaaggtcgattgaagcg

SEQ ID NO: 844 - RNA, 21 nt, synthetic construct
  source 1..21: mol_type = other RNA
tacagttagagttaatgtttc

SEQ ID NO: 845 - RNA, 21 nt, synthetic construct
  source 1..21: mol_type = other RNA
taagttaagaaactcttctgt

SEQ ID NO: 846 - RNA, 21 nt, synthetic construct
  source 1..21: mol_type = other RNA
tcaacatttgaggagtagtac

SEQ ID NO: 847 - RNA, 21 nt, synthetic construct
  source 1..21: mol_type = other RNA
tagtcatcaatgttatggaag

SEQ ID NO: 848 - RNA, 21 nt, synthetic construct
  source 1..21: mol_type = other RNA
aagtttaggtgctatcattgc

SEQ ID NO: 849 - RNA, 21 nt, synthetic construct
  source 1..21: mol_type = other RNA
tgtagaaggaatgtctgtctt

SEQ ID NO: 850 - RNA, 21 nt, synthetic construct
  source 1..21: mol_type = other RNA
tacaagaagtgtcattacatg

SEQ ID NO: 851 - RNA, 21 nt, synthetic construct
  source 1..21: mol_type = other RNA
tttctcaggatctacttgtat

SEQ ID NO: 852 - RNA, 21 nt, synthetic construct
  source 1..21: mol_type = other RNA
agacatttgttggttgtgacc

SEQ ID NO: 853 - RNA, 21 nt, synthetic construct
  source 1..21: mol_type = other RNA
agacgtttattggttgtgacc

SEQ ID NO: 854 - RNA, 21 nt, synthetic construct
  modified_base 1: mod_base = i
  source 1..21: mol_type = other RNA
ngacgtttattggttgtgacc

SEQ ID NO: 855 - RNA, 21 nt, synthetic construct
  modified_base 1: mod_base = i
  source 1..21: mol_type = other RNA
ngacatttattggttgtgacc

SEQ ID NO: 856 - RNA, 21 nt, synthetic construct
  source 1..21: mol_type = other RNA
tgacgtttattggttgtgacc

SEQ ID NO: 857 - RNA, 21 nt, synthetic construct
  source 1..21: mol_type = other RNA
agacatttgttggttgtgact

SEQ ID NO: 858 - RNA, 21 nt, synthetic construct
  source 1..21: mol_type = other RNA
tgacatttgttggttgtgacc

SEQ ID NO: 859 - RNA, 21 nt, synthetic construct
  source 1..21: mol_type = other RNA
tgacgtttattggttgtgact

SEQ ID NO: 860 - RNA, 21 nt, synthetic construct
  modified_base 2: mod_base = OTHER; note = 2-aminoadenosine nucleotide
  source 1..21: mol_type = other RNA
cnttgccttactgaaatccaa

SEQ ID NO: 861 - RNA, 21 nt, synthetic construct
  modified_base 2: mod_base = OTHER; note = 2-aminoadenosine nucleotide
  source 1..21: mol_type = other RNA
gnaatccagagcctaacctta

SEQ ID NO: 862 - RNA, 21 nt, synthetic construct
  modified_base 20: mod_base = OTHER; note = 2-aminoadenosine nucleotide
  source 1..21: mol_type = other RNA
gattcggaaactcagataant

SEQ ID NO: 863 - RNA, 21 nt, synthetic construct
  modified_base 1: mod_base = OTHER; note = 2-aminoadenosine nucleotide
  source 1..21: mol_type = other RNA
nagtcacaaccaataaatgta

SEQ ID NO: 864 - RNA, 21 nt, synthetic construct
  source 1..21: mol_type = other RNA
agtcacaaccaataaatgtct

SEQ ID NO: 865 - RNA, 21 nt, synthetic construct
  modified_base 19: mod_base = OTHER; note = 2-aminoadenosine nucleotide
  source 1..21: mol_type = other RNA
gaaagtcacaaccaataanta

SEQ ID NO: 866 - RNA, 21 nt, synthetic construct
  source 1..21: mol_type = other RNA
ggaaactcagataaatgctaa

SEQ ID NO: 867 - RNA, 21 nt, synthetic construct
  source 1..21: mol_type = other RNA
atccagagcctaaccttcaat

SEQ ID NO: 868 - RNA, 21 nt, synthetic construct
  modified_base 2: mod_base = OTHER; note = 2-aminoadenosine nucleotide
  source 1..21: mol_type = other RNA
tnctgaaatccagagcctaaa

SEQ ID NO: 869 - RNA, 21 nt, synthetic construct
  source 1..21: mol_type = other RNA
agagcctaaccttcaatctca

SEQ ID NO: 870 - RNA, 21 nt, synthetic construct
  source 1..21: mol_type = other RNA
agagcctaaccttcaatccca

SEQ ID NO: 871 - RNA, 19 nt, synthetic construct
  modified_base 2: mod_base = OTHER; note = 2-aminoadenosine nucleotide
  source 1..19: mol_type = other RNA
gnactcagataaatgctaa

SEQ ID NO: 872 - RNA, 21 nt, synthetic construct
  source 1..21: mol_type = other RNA
ggtcacaaccaataaatgtct

SEQ ID NO: 873 - RNA, 21 nt, synthetic construct
  source 1..21: mol_type = other RNA
ggtcacaaccaataaatgtca

SEQ ID NO: 874 - RNA, 21 nt, synthetic construct
  source 1..21: mol_type = other RNA
agtcacaaccaataaatgtca

SEQ ID NO: 875 - RNA, 21 nt, synthetic construct
  source 1..21: mol_type = other RNA
agtcacaaccaataaatgtcc

SEQ ID NO: 876 - RNA, 21 nt, synthetic construct
  source 1..21: mol_type = other RNA
aaggctgccttagctatctga

SEQ ID NO: 877 - RNA, 21 nt, synthetic construct
  source 1..21: mol_type = other RNA
cgcttcaatcgacctttacta

SEQ ID NO: 878 - RNA, 21 nt, synthetic construct
  modified_base 2: mod_base = OTHER; note = 2-aminoadenosine nucleotide
  source 1..21: mol_type = other RNA
gnaacattaactctaactgta

SEQ ID NO: 879 - RNA, 21 nt, synthetic construct
  modified_base 1: mod_base = OTHER; note = 2-aminoadenosine nucleotide
  source 1..21: mol_type = other RNA
ncagaagagtttcttaactta

SEQ ID NO: 880 - RNA, 21 nt, synthetic construct
  source 1..21: mol_type = other RNA
gtactactcctcaaatgttga

SEQ ID NO: 881 - RNA, 21 nt, synthetic construct
  source 1..21: mol_type = other RNA
cttccataacattgatgacta

SEQ ID NO: 882 - RNA, 21 nt, synthetic construct
  source 1..21: mol_type = other RNA
gcaatgatagcacctaaactt

SEQ ID NO: 883 - RNA, 21 nt, synthetic construct
  modified_base 1: mod_base = OTHER; note = 2-aminoadenosine nucleotide
  source 1..21: mol_type = other RNA
nagacagacattccttctaca

SEQ ID NO: 884 - RNA, 21 nt, synthetic construct
  modified_base 2: mod_base = OTHER; note = 2-aminoadenosine nucleotide
  source 1..21: mol_type = other RNA
cntgtaatgacacttcttgta

SEQ ID NO: 885 - RNA, 21 nt, synthetic construct
  modified_base 1: mod_base = OTHER; note = 2-aminoadenosine nucleotide
  source 1..21: mol_type = other RNA
ntacaagtagatcctgagaaa

SEQ ID NO: 886 - RNA, 22 nt, synthetic construct
  source 1..22: mol_type = other RNA
agtcacaaccaataaatgtctt

SEQ ID NO: 887 - RNA, 21 nt, synthetic construct
  modified_base 2: mod_base = OTHER; note = 2-aminoadenosine nucleotide
  source 1..21: mol_type = other RNA
gnatcaaacctcacaaattct

SEQ ID NO: 888 - RNA, 21 nt, synthetic construct
  source 1..21: mol_type = other RNA
ctgaaactgagagaaatggta

SEQ ID NO: 889 - RNA, 21 nt, synthetic construct
  source 1..21: mol_type = other RNA
gagtcacaaccaataaatgta

SEQ ID NO: 890 - RNA, 21 nt, synthetic construct
  source 1..21: mol_type = other RNA
ggtcacaaccaacaaatgtct

SEQ ID NO: 891 - RNA, 21 nt, synthetic construct
  source 1..21: mol_type = other RNA
ggtcacaaccaataaacgtct

SEQ ID NO: 892 - RNA, 21 nt, synthetic construct
  source 1..21: mol_type = other RNA
ggtcacaaccaataaatgtcc

SEQ ID NO: 893 - RNA, 21 nt, synthetic construct
  source 1..21: mol_type = other RNA
ggtcacaaccaataaacgtcc

SEQ ID NO: 894 - RNA, 21 nt, synthetic construct
  source 1..21: mol_type = other RNA
agtcacaaccaacaaatgtct

SEQ ID NO: 895 - RNA, 21 nt, synthetic construct
  source 1..21: mol_type = other RNA
ggtcacaaccaacaaatgtca

SEQ ID NO: 896 - RNA, 21 nt, synthetic construct
  source 1..21: mol_type = other RNA
agtcacaaccaataaacgtct

SEQ ID NO: 897 - RNA, 21 nt, synthetic construct
  source 1..21: mol_type = other RNA
ttagcatttatctgagtttcc

SEQ ID NO: 898 - RNA, 21 nt, synthetic construct
  source 1..21: mol_type = other RNA
ttagcatttatctgagtttcc

SEQ ID NO: 899 - RNA, 21 nt, synthetic construct
  source 1..21: mol_type = other RNA
ttagcatttatctgagtttcc

SEQ ID NO: 900 - RNA, 21 nt, synthetic construct
  source 1..21: mol_type = other RNA
ttagcatttatctgagtttcc

SEQ ID NO: 901 - RNA, 21 nt, synthetic construct
  source 1..21: mol_type = other RNA
agacatttattggttgtgacc

SEQ ID NO: 902 - RNA, 21 nt, synthetic construct
  source 1..21: mol_type = other RNA
agacatttattggttgtgact

SEQ ID NO: 903 - RNA, 21 nt, synthetic construct
  source 1..21: mol_type = other RNA
agacatttattggttgtgact

SEQ ID NO: 904 - RNA, 21 nt, synthetic construct
  source 1..21: mol_type = other RNA
agacgtttattggttgtgacc

SEQ ID NO: 905 - RNA, 21 nt, synthetic construct
  source 1..21: mol_type = other RNA
agacatttattggttgtgacc

SEQ ID NO: 906 - RNA, 21 nt, synthetic construct
  source 1..21: mol_type = other RNA
agacatttattggttgtgacc
